United States Patent Application Publication US 2025/0051733 A1 - sequence listing, part 2

SEQ ID NO: 32 - DNA, 207111 bp, unidentified
  source 1..207111: mol_type = genomic DNA
catgattatccgtaaccaaagtggccgagagcttgtattcagaaatgatggatatctgcaattagcccacttagcaccaggaaacacagataatgcaaacaccgtaaatggaatacgtttacagcgcggtgatacgattttcgatagctttaacgcatggcagtcgggtgaatatgttcgcgctggatggcatttctataacgccgctggagttgaccagtggttagcacttacagatactggtgtaaaaatctggggtagtgctgctaatctacgcgttgaaggtgttggtaatttctgggacgttgaaattcgttctgaccgtcgtgtgaaatcaaatattgctaagattgataacgctcttgataaagtgtcgaagctatctggtaatgtttatgatttacagcttccaaatggtgatactaaaccatcggctggccttatcgcacaagaagtgcaggaagttcttcctgaagcagttacaactgataacgataaagatgcattacttcgtttaaactataatgcagtaattgcgttattagtcgaatctgttaaagagcttaaagcagaaattgaagaacttaaatctaaataatgttatggggcttcggccccatctttgaggagatatcatggcagtaacaggtcctaatgtaggaagctcagctaaggctgtaaccggagaatcttcaatgattgcagctggagcaaaattaaggttgggaacaccatttatgatgtctagtatgatcggaagaaacgtttggaatgctagtataactatttcaggtaacaaccctccgacaggacctagggttcgtggtgcttggaaagataagaacagtgcttcatggaacgtattgctcgatgcgcgtgggtctttatcaggaatttgggaaactgggtttaatttagttgcctttggattatcagagccaagcaaaacgactggttataatgacgcaattgttctagaaggcagtggaaactttaacgttaactggcgagttgatactgaagacggcaatcaattccattttaatagctcacgagaccaccgaggaagacgctgttatagctgtacagacaacaatgctttttggaactggctttatgctaatgatggacgaactttccaactgtcgtttactgcatactaaacccagtaaagagaagcaataaatagcttctgtaaggagagcaatatggcaagcaaacaatcaataccattttttgatatgtttcttgggttgctcgagctattgttcaaagatggagccacgggaagagttctcttttcccgtgtttttgttgtcgtacttttagcaatgttggcgtttgctggatataagtctgatagtcttattaccgcttatgtcgacagtacttatgacaagtatgataaactggttcaaaaggatagggatgcccgatttgataacatagcactcgaacaactccagatagtacatatctcaagtggtgcagatttttctgcggtctttacgttcagacctaaaaacttgaactacttcgtagacttaattgcttatgaggggactttacctagcacggtagattctaaaaacctgggaggatatccaatcgacaaaacgtctgctgaatatagtacgcatttatcgggtagatatttttggacggataaggaatttgctttcttaccaacaaaaagaaaaccgcctgaaatatcgtatatgtttagctgtccgtatttcaatttagacaatgtttatgctggaactgttgaaatgtactggtacaattccaaacctgcattatctaacgaaagactaacatcgatatgtggtcaggcggttagagctcttggaagagctaagtgattacttattactatgcatagccattgttcgatagatagactcaaatccctcgttgtattcttcaacgagaattctcttctcttcgtcagttaactcagaaaccattttacgaaagttgctctgatttaactgacgcccctgctcattcttgattccaatttcattcaagaacgcaataaattcatctcgcttctccatgatatgttcagcattgaacttggtcagaatagaagcaacagtaacaatttcttggacaatttcaaacttagtcattatttttcctacaacataatggattatgtgattatagtatcatcttgataccgcgttgtaaaccagtttatgccaattcccaacgagaattcaaatcttccttggtagtgatatactcagcaccagaggacatccagagcccgtagcgaccatcttttactctagccgttaaataccattcctttccaattggacgaaccctacgattcatccagtgacatacgtcaattgcctcttgaaaggacaagtcaatcagacttccaagcgcgattttattcattaacgcttcaagatatctttgtgattcaacgacagattctaggttatgactcatgctaaaaccacctctccgcgattacctaaaatgctttcgatatactcaactccacttataatgtcacctctatcctttgctttaatagtaataattccatacgtgtggaaatctgctgatagactaaacggtttagaagtttcctgagtaaacgtaaacattactgcttgctctaaatgttttacttctaagtcattagcccaagagttaagaactttaagcctaacttgtaaggtgtattctactttaattgctgaaagcaattcaacgcgtttatgatatgccttggcttcatcttctctgcgtaaagtttcagtattcatagataatctccaatgtcataagcatcaacacatttctgaaattgttcaataacttcttcaggttcaacattagcgataatagctacagtaaaggtaccattattccaatcgtgtaccatccagtctccatagccagcattctggaggtcttccattagttcagaatggatatctgctactaatccagaatggtcccctaatttcttgtggagagcttctaggtcatcacaaataatagttaaagtagtacatttggaattattcagaatgcgcattgtctttacctttgtgtttttgcttacgttttgattctttggcagcgcgctttttatctttatgcgcgcctcctttgttaaagtcattcttcgctactgggttgtacatgtgcaattacctcatttaagcagttgcgtgtaatatcaaaacgcttagcaataccacattcttggatatgtgcttttaaatctccggcatgcacatatcccaattccaagataaaccgtttaatttgagccttttctgaacgatttaagctattgaagtaatctgccttggcgcttattgctctcacgctttatcttccttacattcaagttccttgatataatagtcaatatctttaatcatttcttctgtcattattttgtacatttcagcaagaaatggtttagcaccgccattaaatggatggctaaacgggcagatgtattctttatccatgagagttttcatgaatttgctatctgccattttaaacccggcttcattggtatatgtaccccaattatcgtccatcatttctaacgaacgctgaagcgatttacgctgaatttttaaaagcgtaatgttattctttaatgtactaatcattagtataaatcctctgagaataattcattggcgggtcctgatttaggacgaactgtattaacttggcctgcatgtgtagcgatgattaatgcttcttcgcgtgtgaagtactcaccccactggtcaacaaatccttgattgtctccatggacatggtcagaaactaatttgtcacggaacatatctagaacgttcgccatatcaacagaataatggcgagtgcctggaaccacaattgttccaccagttttcaattcaaaacggtttgctgcacaaacgatacggcgttgaagtaatcgtccatcccaccaatcagctactttaaagcaaatttcaggaatactaacttcttctggctcattaattagagcaccgtgacgagaagcatcaacaaatttattcatttgttcggaaaacttgctcatttaaagaatcctttaattttctgccacaaacttttcttttcacgaataccaatttgacgaataacaggttcaccctgcattttctctaaccactccattgagttaacagcttccgccattggaacaaatttagcaagggccttttggtagttatctacatccatgatatgtttaccatctgcattgtagatagcatagcattttgcgaatttcttatcaatgtatccgataaagtgcccacggaaccatacatcccaacaatcagttgggatattagcattcaagttaactttttctacacaacgctgaagttcattcagtactttaaacttgttcattacagttccttaatagagcggatgatggtttcaatgttttcagcagtacgggcgatatctaagtaagtattgcctgttgcagctacacggcaagacattccaaggtcagtgaagtgtttctgatgctcttcagaaatcttgtaaccgaagatgcggaaagtacctttgttgttaacttcaagactacgaataccgaaggtacgtttttccagaactgcgatatagttactgcggtaaacagtcagttctttcaaaggcaagatatcttccatctcgctaagaatgctcatcatcaggtctttgtgctcattcatatcttcagtcagaggacgagctttacgagtattgcgtttcttaagaagttcaggcttgttctcttctgcatagataactgccgctttagagatgatgtcctgtgcttcaccagtgatgattaaaccgtcaccagatttctcgatgagacctttcttaatcagaacaccgatgtttgagttaacagaacctgcgttcatggtttcttcaaggatttcacgcagttcagcagaagtgatgaaatcctttttagctacctgaaccaagatagcagcagttttttcgttcagagcatcttcggaagctttgatgatgtaagttactttagacattgtgattctccattctgttttgttcaatttgtttggtatgagactataataacatctgctaaccagcttgtaaacaactttgtgaaaataatttggggcattctaaggagggattttggagggatatagatttatatggaaggacctggagatgacctccaggttccctagattaactgaggagcaataaaactagacctaatactgcaattacagaacctataattaaataaaattctatcatagttcttccaggtctttcagatactcagcctcaggagttgtcttttcccagtacttaacctcttgggcaagacgttttgcttcctgagcgagtttctttgcttcatcatcagtgatgtgatagatgttcattgaaacaagtttttcagaatgttctttgaatagttcattctgttcaatttctttagtcaactgcttacgagttttgccttggataacgatgttacctgcgataacctctttgataaattgagcttttgcctgagcaagattaaatgcctgcttagtttcagcgattttatgctcgattcgtttggcggtgaatgtcttacggacttctacaaaatgacgaatcagctcacctgaagttttgaacttatcgttcagtttaccattctcgtcgatgactacgatatactgactcattttctcaatgagtttaaaatccttcatgattttagcatgacgctgctcagggtcatcgctcaaagcatagtctttacggaatttcaccttaaagccaaacccagtcttagaacagtcatcatcatatgtgatgtatcctgcatcttccaatgggtcgagtactttctctacataagaagcacgctcaaacttatatggaatttcactgatatagattgagttccgtgaagtttctttatacacaccgtgcagctcaacagaaccatcttccgtctgaacgattttaccactgaatttagggaattgcacttcaggttccatcacttcaccacgaagagctgctttagtacattctaaaacagattcaaagctatgcggaagaatagaagttgaatatcctgttgcaataccacgaacgccattcagaagaacagtcggaattaccggcagataatacgcgggcggaacgtgttctttgtctttatgcaccggagcgatttctgtgtctttgtagattttacggaagttgtcagaaatccggcagaaaatataacgacttgccgcagcagattgaaccaaacgagaaccgaagttaccttgtccatctaatagaggatagttgttattccatgtgtttgccatcagtgcaccagcatcttgggcagacgtttcaccatgatgatatcctaaatcagctacaccaccggcgacagacgcaagcttatggaatttttctttattaccacgagccaaatcaagggcacgagcaataacaaaacgctgtacaggtttaaacccatcaatcaagtttggaatagcgcgattttctacagtataaatcgcgtattcttttgcttcattatcaatgatagatttcaaatcacgatgacgaagatttgatgccttagctaaatcatcaatagaacctgcttgctttaatagagtgtcaaaaatatccattgtacctaccaaattagtgagccgatttgtactataacatcggaaatgaaaagcacaatataaatcattccgtaaatcattccatagtacataactaatagaaaggcggcagcaatagctgccacaattaggagtttcttaatcatttgtaaactcctacaattttacaaatgcgctcaaacataataaatgctgcggtgaacgcaatacttccgattactttagtggtaggcacaaggccataccacatgaatgttcctgagcaaatcattagggccatcagaaacaagtaacccatcacgaagaaggttctcattagtatttctgcaaagtaaagatgaagttatcattcagaatacgattcagctcagagtaggtctgcgcgtcgcttgaatgctgacgagtaaacgccagtgcaagttgacctttgccataaccggtggtgagcggtttcattttattagcaggaatccaaaacacaccgtatgttacacagtttgaacgaagggtacgacccaactgagaacgcccagaacggatatgagaaagaacactctcaaaccctgcttttgaacgttgtttagctacaaagaaacgagcagatgcaccgatataacctgctttgccatcattgagcatcaggaaataaaatccttcacgctcagtaatttcacgagatggagcacctgctgcccaatcaccgttacgaatagaaccgatcagttctgcgccagcgttatcgagatcagcaaaagtcataatattacgcatgttaatttcctcagttgattaaagtttattctccgataaggggccgaagccccttctactaccaaaaatatactactgccgttacaccaccaatccaaaacacaagaagacctaaagcaagcagacgatacacgatgtgccgtttcatttttgaccttcccatacggtttctactaaggatttaaggccatcagtttgaataatatcaatcgcattaatggcaaaataaattccgaatccgaacacggtgacaatccccagtgctaccgcaacaataacagacagaacagctgttctcattaagttaaagcgacgatcaaaactattacgaaccattatattttcctcagataaatgcattaatccaaacgttaaccaaatcccatgcgaaaacaccaatgaaagtaacgataagacagaatactacaaaggtgttcttcaaaatcgtaagtaactttttcattttgttctccagtttagctaacaagactatagtatcactggagaacaagaaagtaaactattaaatgcacaaattacgaattttttcttccagagctttgactttctctatgtgctcatcacgagcagcggcagctccattaggatacaacccgccatacgttgaatcaccgttatcacaagcaatgatagtataatgccaattcatagattcaagaatcttatactctttcaaaagctcagctttaatagaagcatttccgcgtttggctcgaagtgattttagctctaagtaactcatgttttactcccgttcagtttgtaaggccatagtatcatggccaatcccggaagtaaacaacttttaaaatttgtgcatgatatacccgccagctccaactcgtgaaggttttactacttccatgagctgttcgataccgccactgaacatcggtgtgtaccgtatgacattctgggacacttcttctgcaacgaatataattatacagtctgcgactttatgtttaaacatgggccctagatttattccacttccattagggaatagaccgtctttaccagtcgtaacattaatccatggcttatgatttgctcggtcatgaacaaagtgtgttttaacttcaaccctaactccttgatagtacgggtgggctagtacgtcccatgcccattcgtatggatcgttgttattatggtcaacaacttgatcgttcacgtatccatcaagaaaatccgctaccacatactctgccggtatagcaattctacatcttttaagaacatcaattctgtcttgagatgggtcgatatctaaactatatcttgcagtatcaatgatttttacttttgcttcacccctcagtttattcaaatctagggtaaatgtccgcaactggttcaatctctgcagggctttgttcatcaatgccataaattcctctgatatgcaattcaccaaaataaacacgatcgtcgtggttacatgtgtctggttccacaacaaagtcatcaccaagttctacgagttcatcacagtgcaaccaagcatagtgaacatcaccttcatgtttaaccacatgatggcaaaacaccgtagccgcatgatgagtaccacgaagattaacaactttagaatgagatacgttaaatggattaatcatgtttcacccataataaaagaggagcccgaaggctccttataattagcgaagttctgaaccccaacgatcagttacatcttctaatactacataaccacatgtacgcattttagcatcgttgtaatcaaccgggatagatactacatcacgcggatgaactttaactgaaacaatacggtcagaaccactaccgaagtgaccgatgtaagatttagagcagacatgcagacctgcggaacaagtacgctgatcgtcttcatctacctggttacgcggcattgtaacagttttaccaggagagttatcaaacgtgtttgaagcacagtccatataagtggaacgaactactttccaaccaatgaagtgaccatcatcagtgatgtcgatatcgtttgcattcaggaaatcaaacagacgataaactgcacgacgagacgggttcagcatcaggttttccaggaaaggcagataacgtttaaagtcttcgccatcttccatggctcgaacgatacgctcagtcagaccggatttcagctcgatatctttatagaataaagtaccatcttcaattcggacgttaccctggacgaatttcttgatgccttgttccaggttaatgtggtcaatagcaccagcgatatcaccatctacaagtttctgcagcgcagatttaaacccaggatgttggctatcagcgttataagtagtacggccttcggtaattgaaatgaatttggaacttgctgcccatttaaattcacgctcaactggagcttctactttagcaggaacagctgccgccgcagctcgagcttcacgctctttaaacacacgccgaatggtgtcacgggaaacaccataattctcggcgagctctttcttagtgtacagaccgtttttgaagtttttaatgattgcatctttttggatttcagacagacaggtaacagccatttattcacctttattttcagaattttgagtagaagctccatcaaggagctccatgatttttacgatatcatcgacgagtttgctgtcagtccgccaagtatccaagacacttgcgatgacaggataatcatctttaaactgttcaatctttttatagaagattgtctcagcatcaccagacagtttattataaattttattacataaagctaaatcatcgttttcatctttgattttacttgtacgacaaaccttagcgattttgtttaattttgtcaggaacggatttttcattccagacgcagtaaacttactcgacaagaaattcaacttatcgtaatgcgcaatatttccacagatacggtttccagtagcatttgacggcatgtactggtcgtaatctaccttatcaatacacttgatgtattggtcaataataaatcggtcaaatgaaagcaatccatcagctttcgccgcggctttcatagcacccggacgaattgcatagaatttcttaattccacacgcttctgccagagaccgcatatctgtgatgctcatattccaccaccaaacattatctgggaaagtgtggatttcatcacgattgcgaccgattgcataaccttcaagctcagcaatttcagatgatactaaagtctgacggtcttcttcccagtacccgtctttatcaatccaatgcagagaaacattaggagattttggacgtttctcttttggaccagtatcataatcaggaagagcttttctctgggcttcaagttcagacacacggaatactacgacttcatcagtatccatgattttcttcagctcatcaatgacatgtaattcatcttcattgtctttgattacagtaatgtgtgcccagattggaactaacccagatttacacagagctcgaaccgtagcaatacgtttacccgctttatcgtcaataagaacaaacgctttagttctatcaaccccgcaaatatcagaaatgtttacttggttatgacgatgccaagaactgcttgacactttacgacgagcaggttcatcgcatgaaacataaactgatacttcgttatctacataatatgaacgaattttatcaagattatacttcgcaactacttgtttaatatcgcggttcccaatggtaataccacggctctgaagaatagaacgttccttagaactcagcttattgaactcacgcaagaattcacggtcagattcatacgcttcaaacgctttaatatctgcggtaattacctcttcttcaagagcattcacacgcttctggatattagcaattgtttcttcgtcaagagaaagctcttcacgagatggagtaatgtctaattcgccaagagggaaatgaacataaaccttgccataacgattaagcagccaatctgccttaacatctacaccgctaatcggatatacgatttttccataaactgcatacagaccataactttcgtaagagctattaacgctgaaccagtcggtcttatctaccgggaaatattcaatttcgcgacgaagagaatctaccttcggaggaacagcaccaaacgtacgcaaaatatatgcgatttcatagtgccaggtatcaatatcttctactttaaccggaactgtaatttcaagaccagtttcttcgtcttctttcatatcatcgacaaacatcggacgaatagtaggttcacctcggtttttcatgacagtataaccggtggctttaccattatgatatgatactacattaaatgtactcgtgtagctcagtggagatttagaaccaagaccaagagcaccgatgaaatcattactgttattctttgtggattcaaagaacgttttgtacatcgtcatcatgtcattatgattaagacctggaccataatcacgaattacaaatcgtgggtcaagacgagtaggagccttgatataaaatggacgattttcattaccgttcagtttatgagcatcatcacagttagtagaaagttcacgaacaacagcacgaactttatacttatagagtttgtttgacaagatgtcaaaagctttacccgaggccttaatagtaaacgttgaatcatcagcgtcagaagaaccaatgattacttcatcatcacatttaattttcattttattcctatcaattatgtcgtttaatgatttctgctacttcaaggagctcttcagcagtagcggtgttagttgtaaaaattttattatggatttctttgaagcgttctttgaattcctcagctgcttggatgtcaaagaaccgctggatgatacgatattcacgatatatagcatcgttgaataattcttctgatgggatgtaactgcgtttcataatattttcctcagtgatttagggaaattatatcactataactttaagcaagaatcctagaatcatctccaagcacttcttgattaaagccatataaatccattcttataaagaaaaagggacccggaggtcccttagattaccacaccctactaactcgaccataaacctcatgtttagaaccatcaatgttttccacccagatagtaacccaagttccgggcagaggtttcttttcagcgaacagatatccatagtcgcctgagatcaaagtaatccaataacgttgcatgttaattccttctaagtaagggcaatagtacccttactatttattctttattcactcatccatgtcttacgtggtgcagcatcattacccataattaattcaaacagttctttccagttttcaggaagagtgactacatcataaaccgggtcttgaataacacgttcgtattcatcttcttcaagagaaccaagacctttaatataacgaagtttccaacctttgaaatcatctttatggtcttcatattcaccaagagaatagaaccaacgttgttctttacctttggtgagaataataaccggagttttcacaaagcggattctaccctgttcaaacagttcaggccaattactgaaaaacgctaaaagacttgggaaaattgaaccaacaccatcaacgtctgcatcagtcatgatggcaatatttcgatagttagtattttcagcgggttcaccgatagtcaaaccagtgattgcacaaatgtcaaatacttccttgttcttcatagcatctgcagcagacattccccatgtattcatgaacttaccacgtagaggatatccgccatgaagttcacggtcacgagttgtgagcagataaccaatcgcagaatcaccctcggttaagaataaagtggtgtcagcatctttgccatatttgttggctttgatgtgcttagctactttagctttctgcgctttcttggcagctttagtttctgcagctttctctgcagcaagtttacgagctaacatcgcctcaataatcggcatatgaatatcttcggatttcataatagcgttagcaagtttcttataatcaatatcaatatggctacgaatttctccccaaggagaagtcagacgctctttagtctgagaatcaaatcgcatgttagacatatcacgaataaacatgatgacagtcagacattctttaattcgcgctttattaacttctagtttgtacttacgctttaatgctggaataagttcattgctcagttcatcaagaactaggtcaacgtgagtaccaccgtttttggtgtgaatgttattaacatatgaaagttgacggaacccgtcatccgaacgaccaatggcaatagcacaagtatcagaatcctgcactacagcattttcgtcatacatgtgggcgtaagctttaaacttgccttgaacccgtttacccatgaatttaaattcaatatcaggataaactactgctaacgtcatcagacgatcgtgaatgattgattggtcaacatcagttaagccatcagattcaaagtgggtgaaatctgggataaatgacacgacagtaccagtcttgtctttaataaattctttatctttagctggatgttcttcccaagaaacattctctgcgccatttgaacagcggacaacgatttcattttttccatcacaggttgcacccacaaatgtcacagaaaaaatattcgttaacgcagaaccaacaccgttcataccaccggttttacgctcagcatcatcaccaaagttaccacccgcacgaggacgagtccatgcagctactggtcctggaatagtttctccttcaggtgttactacaggagcctgcggaagaccacgaccattatctgttacaataattttgttgcctttgacatcaactgaaatcttattcgcgtgtttgaaattagtacgaatagcttcatcaacagagttatcaatgatttcatcaatcagtttgataataccaggaacatactttactgattggaatttaccaaaaagaaaacggtcatgcgcttcaaacgcagaactaccaatgtacattccgctacgcttaatgatatgttctcggtcactcagaattttaatttcgttcttaatcattacatttcctcggttagtgaaggaattatatcaactattaattatagcaagtaattcttctttgatatacatcaatttaccaagaacctcatggcctcctttaaccgctttatactcgggatatcgtggccgctgtcgttcaaacatagtccattgagcatcactaacgttagcgtatgcatatcgagaatttccgtagtactgttcaatccggtactcgttgttttcattaagtgaaatccactcttcacagacttcataatatttctgcatccaaatagtacgaccattcacgtcattaattggccaccaagcaaacctgtattttccaatagcccgctctaccatttttaactgtcgtttagcacgcctttgtgcagttgtcattccaataatcataatattctcctctggccaacaagactataataccaaaacacgatgtccatgtaaacaactaaatgacccgaaggtcatttattcataacgaattgtgctgttcttaagaaaaagccctgagcacactgttccgttaacgggtttccctgttggcccaatagccgtaaagcctgtgtgctgaaaatcatcctctgagcaagaaaagaacttatatccggtgattttgatatcagtaaatcccgcgttatctaacacgcgagttgcgttatcagcgtcagtgcatccaatcatcatgaaggcaagcgctgtaattaaaatctttttcattttaatttaaccctataagttatattacctactttaataacccggatttctccgggtttcatggtaatgcgtgctttagttcccatcaataatcaccactctttaatccatcgtagtgaactgccggagcagaaaccacccgcttcatttgaccttcacacttagggttaaagcagttaacagtatagtcacgatgggaaattttacgcataatttctatcttttttccacagacttcacacttgtaatcatacattggcattaacagcatccttccatttttgtgttttgaccatgatttgctcattcagtgcacgcgtaaccatcatggagatttcatcatctgatacatgggtatcatttttatggcgatttctgaaatgcagccaaagtgcatccactacacagttaataacatctgcgcactcgccttcaaattcttctttctgccgccatggacgattaatccaatcacacatttctccagtttctgaagaaagttgcagcatgacattcccaatgctacgattaggaataggataagacatttttgatgcttcaaaaataggagctaaatttaacattgatatgcactctgcagtgctgcaatagcagcgattgcttgaccacgattatgaatagaaagattcataaccaaatcggttggaattacattcgcggaagttccaacttcagtaaagtatttgaattcgctatcaaaaattacaagatcttcaccgccgacttcatcacattctgtgccattagcccacgtaattcctgatactctattattttggcggtcaactttagtaacagtaaaactcccgccattttcatagagttcatacacaaagtcttcattaacctcatagcgtgaagaaaattcttcttcagcttcatcattgacgaatttgtactgtacgccttctttaaaattcattacacaatctccatgtattctgggccatcaactgtgattacacgagcaaaggtacgaactgggacgatatcaccatggttcgcgaatacatacaaccaagtccagtgctcttctttaccgaaggttttctctttctgaacaacgattaagtccgggttgaacagaacatcttcaaaagcttcagcagtaatttttacggtattttcagttttcatgttattctcctcagtagttgataaaataatagtaccacatccttgtggcaaagtaaacaactttttatactaaaccttgacgctgtgattccgtcggctctacatcagctttaggcagaactgcatagttgccttgaaacactacgtttactaaggttttaccgtcttcttcccactcatcagtgacaagaacatttttgtgcagcgacagattagtggctgaattagtagaactcaccgattgggtaataacattgtccagcgaattcacgtgtacccacttgcgcagatagctttcactagattcaacgaattttttcaagcagtggatgtaatcgccaaaatcttcacggtaaatcttatacccagatttaccgtcattacgattaactactttaacgattacaccattgtgaccaacccacttaccaccaattactttaacgttttcacctacaactaaacctttcatcgtgtttctctcagtttgttaatgtagagccattatataacggctctttcataaagtaaatagttatcggtgagaaatttcacacccaacatctactccgaacatataccctgcatcccagcccttagccatcaaagccttggccaccagaaccatcgttggagagatttccgggaggatttcccggttgaaccactcttcgaagttttcatcgaactcaaactcttccattagccacgccccttaggtaaactcagtggatcggtatcttctggacttggtgcttcgcttaggcctagagcataacgttgagcatatttaagcattagaatatccttagcgcagtcatggatactatcatgcgcgataaacccgtcgagcgtaccctttggaagaggggtagttgtcagaccacgagtcagaagcagtgattcaatcgcggtacgaatatcacgctgattccagaacttacacggctcttctttaaatgtatcaatttcttcttcggaaattccttgggctcgttgaacatcgcgaagacaatcaacaaaaatcggaaagtcaaagctctgtccacgacaccagccaaaggaatcccatgggtgaattccattatcaatcagatattgctgagcttctttaattccagcaattactgataaatcgtctggcgttgaggccaggttagcacgggcctcagctgattgtttcttccaccactcaagagtagacttaccaaacaaccgatgacctttctgggatttaaggtcaaacttaatacgatgaccacgtttaaccaattcatcgaagctttccaaaacttcggggtcagaatcaaaggtgattagagcaaggtcaatcacagaagagcttgacacatttccgaatgtttcaaaatcaataataaagtctttagccattttgagcctctagcataaatttaatttcgcgtaactggcaaccaatatattcgctcagatacacctttgggtcatatcctgtgaaccaagtaatagcattagcattatctgctatatcacgaagctcattcagaactgtatcaattttaatgttaatagcacgcttaacattgtctggtgcttcaaacttagattcttgtaagccaacaatcattgtttgaaggtcttctaatttcaattcaaacatattacctcacacataaaacacatcatatcgaccacgagtagtaccaacatataataactgctgtgcgagagaagcatctgccatgtgaatgcatggagtataaatgaagcttctgtcaattgagatgccctgggccttatggaaagtcgaagccggtaatgctttcactttatggaacttacgcttagcatcccagaactcagaccagggtgctttaccgcctttattccagttcttatatgtatctgcagtttttgccaagaaaaattgaaacttattcatttcttcttcggatgagatgacacagattttctctctagcgtactcttcatcgtcgccataggtttcaatatctaatacccaatgacgaaccagatattcacctggaacacctctggcacctaaaaatgacgtggtttcagttgcatctaatatgcgaacaaactgaccattattgaaaagaatttcgctgaatttcttcccttcaaatttaagttccttggtaagaggttcttgcataacaacaatctcacctactacgaatggtcgttcagtttcatagattcttcgcctgattatttcattcagtttatccacagatttattagtgaacgcaagcattcggttttcaaataaatcttctggtgttttaactaaattaaaataatttagcataaaatctttaagggcagttccttttgtaaaaccacggactccatgaccatcaactacacagtcacgaatccatccaccatttctgatttcagtagcgacttcaatgattggggcattactccgcatcacctcggtcaaatgaagttgtaagaaatctttatgagtgaagaatggactcagtgcaggttcattacttccaggttctaccggacgtatctgagccttatcaccaatggcaatgacaatacaccaggcaggaatagttgccatcaaaatcttaaacagtttacggtcatacattgaagcttcatcacagataagaactcgaatagatgccatatccggaactttcttttgttcaaacagaacgttttcttcatatgtcgtcgggttgattttcagaagactatgaatagtactggcctgcattccgctgagcttagataaaacctttttggccccatgcgtaggtgctgccaacgcaatgccagagataccctgagaaatcaaagcgtcaatgataaatttggttaaagttgttttacctgtaccagcaggtccattaatcgtaatgtgttgacctttggctccttgtttgaccatttcaatgactttattaaaaatcgctttttgactttcttttaattggtcaaacgtaatcatgccacttttaccctcactacatgtagatttttaatttttgctttgagtttttcgcgctcaacatcgctaagtggttcatacactagctcagttgttttccaccaaagcattcctttggttttgctttttccagtaaaattcccttttgctaatttgtctgttaaaaccgacattgtacgaatccgtgctttattagccgattcttcattagtgaagaccacacatcgttctccatcgtacatatcagttgtgactggatggtcaaatccgtctttatccttatacgctactacatatccatagtgttgcattacattttacctctcaaaagttggaagaaggacgcagtcaatggaagaccttttttcaattttaacttatctagcattgagcatttttctaaccgacgaagtgagctaacaattagccgtattgattgtacacggatttcagcatctgacggacgattcggaactgacgctaaaatagcagataacttacgctcaactttagctaattcagacttaccaccactgatacgagttctcaatgcattaataagttctaaatctgccgaggttgcagttccattcttttctttttgcacaaattgagaaagatgattttcgcgattacgtaagttagttttaattgatgttatagttttttcatactcacgaatcttttccaaacgagaagcttctttatcacttgttggcttaacagaatctgaagaacgaactatgcgtgctgcgatttcattcgcttttcgttcaaggccttcaatcgtattatttccgcgcaaagtattatacttttgcttaacaggaataacattccccattacataacccaagtcattattccaacgctcgagcgtcatgctatcaggatgatttcctttaacagttccaaacttttcgcctgagtatgcgcaatgtgtctgctgcatgatgttaaacagatattctggggtgagattgaactccttgtgccgacgttgagcagaacctaaagttgtaattaaacgagtataaactttagcggtttcagcagtaaatttcatcatgttttcctcaaaaatgctttcgtcttacggacggtataatgggtctaggtccctagttctagataatcactagttgactaagctatagtaacactaaagtagtccataagtaaaccagatttttcaactttgttatgacccaccactttgaacttagttcccatcggtagcatcctttcttgttctttatcaatcatctcgatgtcagcgcttctgcgctgagcaatgttatcaatcacatcatttggtcgcatgaattcagaatctggtgcagtaattaaaagcgatttcatgttggtatgataatcaaatgattgctgacaattattgacttcaatgactacaaaggtcgagtaatgccatttgcctgcaaattctcgggcaatcgtttcatctgttgtgaatgatgctacctttccgaagtcaaatttctctcctttaataagagcgtcataaaaggctttagcctcgcggcatgatagacctctatagagaatgtcactgttatcaatttgatgacgtctaacgatagagtcaagtttcttatgaaattcttcgccaatcttattgttcatgcactgccacagaattgactgttctttgcagtcaaaacgattggctaatgcttcccatacgcttaaatcatataaaggtaatcctttgctttctcgcgcgaagttaagaacatcaatggagcgaatgggttcttcgataggaataacctttgataattttactgaaatagatgggtttaatgaaatagccatgatattctccattttggttacgagaggtatcttatcatggctttttggaagagtaaactactttgtgaaattattttgcccagggagaccagggcggcgggtcagaccagattgaagctagttcatctagaagagcttctggggctttaataccatacttctgtataattatacggtattcgtctttgatgtccttagaaatcactggatgaacttgaacctcttcctgaggctcttccatcatttcaaacaaatccatcacatgaaccactcagtattgcgatacagacaactactgctattatatccatcagctgctttttgcaacagcgggcttggagcaagtttgataaaatctgcgcccatatataaccaaactaacttagtaaattctattagagaatctgtgctatcaatgataatctttttgcctcttgaaattatgtcattttcgtattcatataagctagtttcatgacatacattggtgtatcctttcaagtggagagcatgcagtatagaaacaggacttcctggaactgtatctacgtcaaagacatgagcagtcttaataatgccataatcttcagaaggacaccaaccaaatgcctcgaatttattaattaaatctttgaaatctttgtcgaacgtactgtatagagcaacagtaaaaattctatcttggtctagacgcaaagctccttttgcatcatttcttgattgaactgcgcgttgtaagcttactttatagatttttgcgtttgccacacatagctccttcagtcatgttgttgtcttcaaaccatttatcatttgctttaattaaagcaggcgcagcttttagtaataacgctgcagctcttacacctctgtaccaacaatcaaaatgagacttctttaatggcgattgataccagggcttagtataacatatcattttcttctcctcagttagtagaaataatataccattcccagtatagcataaaaggactcccggaggagtccttaatttttatacttctgcactagcttcaaacattttagcgttggtggttgcccaagttgcagcatcatcaactactgttgaataagcagctttttcagatgggaaaatctgatactgtgcgttagcaatgcgatgtgaatcagaatacaccttaaaagctacggatacttctgtacctttaacttcaccatcagcagttgtatggtcaaaagttttgatatttacgtaagccattttaatctcctatttagtttacaggagtatttatatagctgcggtaagcacctttaatatttctttatcaatttctcgagtgatttcttctcgaagggccaatactaaggccctttctttttgttttctgataatttttaaacgacgcttagatattcttttggccatcagtaaccactgtcttggcgagcaaagttctcggcgtttttcagataatacagcttaaagatttcttcagaatccagaccaagcgccataaacatattcagaacaaagtgcaggatatcaatcatttcaaatttgatttcaagctggtctttatcagacaggtctttgatataagtttcctgcatcttgacgtggtcagctttccatggtttccacacagcactagctgccttttcaccattactcataccgccaagagacgtcagcaattcgcggaattcgtcatcaatgtaatctttttggttacgcagccactgcacgatatcaccagcttgagccaattcatcaggatgcatgttagtaccaggcttgtcatttgcaagacgaacctgaagagatttttgcatatcaagcattacttgcagagggtcaccaccaactttgcggacgatacctgcgtatcgggcttcagctttatctgcaccagcgatcagttgactacattcgttaaagtgtgccattattttattcctttcaattaaattagataaatattatatcacttaacataaatagcaggaggattcatgtctgaagtgaaacaagaatgtaaagacaaaggaggatttggaagatatctttacgtcggaatcgccactgctgctttagctgcatggaattatgtggtagttccattagctagcacacacgggctagttcttcctccaatgccgttagaaaaagttgtgtcgtttattatgaccggaggattgctttaatttaaggggctttggccccctatatcttcgcatatttgtcaagacgcaatttagccattaaaccctgcgatatattttgattaatataatctgttatttcagaagcagttgccccctctttcataatcatatcatttatatctttgcttttccaaggcgacttatcccagaaaactaccctttcacccgcgtctactaaacgcttcatacgcttaatcgtatcaggatgacgaggttcatggtccataatccatgctcggttatcatgacatggaacttgagctaaatctaaagacccgccagtgattgcaatagcattatcaatgaacaacgaatctattggtccttccatgacgaatacgagttttgactcatcaatagtgtcgagaccataaattttggtcgcgtgttcgtgggctttgattgtgatgtatttttgtggagcattctttcgtagtgctcgtccttgaaacgactcaatctctcctttcttgttgaagataggaataaccaaacgtggttcgttcgtctcattcttataggttcctggattaacggagttaacaagagaaggccattggttagtaaaccataaccttttccaagaagtgcttggaatacatctggcagtcacgtatttaactatcggatgttccttaggaagtctgtctaatctctcacagaaattaagtttttctattacagggagttttgcattaattttctcagacggttctacagcctttggcttatcaaagacctgctcctttcttttctcaagaagatactctcgatagaggtcgggttcattatctttaagatactgcgatagccacttattatactcacagttgaagcaatgacagcgtaatccttgacctgcatcaaaaatccagaatcgtgctttattgatatctttctgtgagtcaccacaaattgggcaacggcagtttaacttgaatgttgaagatgtagtaacgtgtctaaatttaggtaggtgagatattgcgcgaattgcatactcgttatcaacccaagacataatatttcctctggccttaaactaataaggccattttatcactttttcttggcagcgtctttatccgcttttcgtttctttggaagagtttcgggtcctttattgacgatgtccccggaagtggtacctgatgcaatattctgtggattgccgccagcatcacctgcgaccatctcagtaacaaactctttgtatgttttcatagagcctcctactatttattcatgcgtaatacgtaagcatttatatgtaggatacagcgtcggagacattgattttggattgtctttgataagcataaactgcttgcctgtatcttcacacttttgcttaatcacggcttcatctttaccagtgaatgccatcttttcagtagacattccacctgaacccgtagatagcgccattattaaaacgtatgtaatcatcctaaaatccacttaacgatgttgaagttatcaaactgggcatcacagtaaagaacataattcaacttaagtgctgcgccgtcgtctttaagttctgcttgcacttctgtttgtttgctcgggtctacgttttccacaatatgaccaacatctgcacgaatctgctgagctacttcagactcatcagcagtcattgaccactcgcataagtctttgtcatagttggccatggcaggaactgcagagcaacttgatactgcgaacactaaagcaagtacaatctttttcattttggtttcctcaagcagcttgtacgttaagagcagaaatcaggcgataatcaccgtttgcgtatactaacattgacacattgccatcagtgtttttgaatggctcaacaactactaaaactgtatcgccttcatctaatgcttttcgtactacgccatcacaacgcagattagcatgtggagatttaactactttgcttccaactaccataccgcaatgcggtacagtttccgctgattcatctttactcttaaagactacgtctaatgctttttcaattgtccacatgatgttttcctctactcgttttgtttcagtaaggccatagtatcatggcctttggagaaagtaaactaccttttgaacaattttttcaacaaagtgtcagaggtcagattcttagtaggtagatatgtagcagagttaacccagatgccatcgctgttatacaccttgacctctccatagtcgcatacagataggtctgctttgttatatgcctcaatgcctcgatgaatggtatctgtggctgttacaacaaaagagtgacctgattggtcacggaccgcgctaaacacaaaaatcataaaatttacctagaattttaactcttctgccagagcatcaagcttagaacgtgatactcgttcctgacgattagattcggctacacggttctgtgcaccggcaccttctcggacggtattgcttggattaggcttagttgggtcgttttgctgctcaatttctacccaacgctgattagccttatgtacacccatagagaacttattgttgatgttcttatcaccgtaccgtgatttaatctgcttaattaattgttgcttcatctgagcgagttcaggggtttcaatcacagctagcataaagtctgccgtagcaggtagaccagcagattctgcaatatcactcatgtccatatcagaagcatcccacgctgaacgacctacctgagctgcggtccaaagaacagtttcagattctacagccaatgcacgaagttcttctgcaatagctttaactaacgtgtaactgttttcagtatattgacgaatacggcaagaagcacaaataccaagatagtcaatgatgataacagtcggtttaaagttcttcttgagtttcaactcattcagaagagctcggaatgtattagcgttagcgccaccagtcggatactgtttaatgattaaacgaccaagagtactagaactacgccatttttccattttgcctttatattcagcgtatgatacacagccatcatcaatatcgtcaagtgatacatcaagcaaattagcatcaatacgtttagcacaaacttcttcggccatttccatggaaatataaaggacattatgccccatctgaagatagtctgcagccaatgaacacaatcctaacgatttaccaacgttgacgccagccatcaatacgttcagtgtaccagtctcggcaccacctttagtaattttgtttagaatgctaagtttaaacggaactttacgagctttattctggtatgataaccaacgagcttcataatcttccatccaatcatgaccaatatagctatcaaacgatactgataacgcttcgcgcatgatatcaggaatagctcccatatcaggaagacgcttatctcgcttatttggctcaagctgggcattagcctgaatttcaataattcgagacgttgcgttgtacatagccttttcttgaacgtacttctctgtttccttaactaaccagttcaaatcttcaggagcatcagataacttatcaataagtttctttgcaccttcatgttccgtttcagttatagacgaattatccagtgctacacataacgcagtctttgaaggaattgctgtgtattcattaacgtgtttcttaattatgttaaacaccgtctgagcaggtccttgctcgaagtactctttgtccatatatggccaaaccttcgtaaagaaagcctggttgtaaatcagattagctaagattgtttctaccactttaacctcttaaaagattttccataatgattttttcttggtctttaatgcactctggatttgttgtttaacacaagcttccacatgaggataaagttcatccttatgagcttcagatggagtactaaactcaatagttacttcccccgaaggagaaatatttaatttatgaacataaaccaagtgtgattgaccatttaattttatcacaatttcttggataacagtcttcatagcttcttggattatttcatggcttttcttgaacactcgttcttgacgctcgaagtctccctcttccgagggagattcttgttcaaatttctcgagttcagattctaaatcaaactcagtcttcattcatgaagttctctaattcatcttcaacttcagcagctgatactgaaccactctcaggaagtttaacaccatcaaccttagttgaaacttttgagttaatcatttctgctaccgcttcatcaaccgcagcgtttgaatcaatagcacccaactgataacgggctttgatagcgtcacggaatggctcgtgcttaaacagaggaccccaaaattccgtactgctcgtatcttttgcccgccaggatttttcttcacgaatcatctcaccggtttcaacatccaggaattctcgtgcataccatccgtttttcggtttaaccacaaatccgatatccagagccatatcaagcagaccactgtatggatcgataccaccatcgaatttaacatcaatgaagaacttacttttctctttgacagtacgtgatttctcggcgttcaggacaaactgatatccctcaagctcagtaccatctttaatttgacgtttaccgatgatgaacacagtatccgcagaatacataggacctgtaccaccagtcattaccgtcttactgaacatctcgatagtctcgattgtgtggttaaccgcgacacaaggaatgttcttaatagagaagtaaggagttacgatacggaagagagacttcagacttttcgcacgagtcatatctgcaacagatttctcgttcagtgcatcttcggtttcctttttagacgccatgttaccaatagagtcgataaacacgatgactttttcaccacgctcaatagcttcaagctggttaaccatatcgatttttaattgttcaaccgactgaaccggtgtatgaattacacggtcagggtcaacacccatagatttcagataagctggagtgataccaaattctgaatcatagaacaagcagactgcatcaggatacttattaagataagcactaaccattgtcagagacatgttagatttgaagtgtttagatggacctgcgaagatagtcaacccggactgcataccaccatccaacgctccactgattgcgatattaagcatcggaattttagttctaactacatctttctcgttaaagaattttgatttagtcagttctgctgtcattttagaagtggatgctttaatcaggcgagattttaagtcagacattcattatattccataagtctccattatatttttctcacaggttaaaggatagagtaattatattactttgttcttgaagctattaacagaagttccatttcttcttggtgttataaaccactgtttccatatctatttcatagtgtattttacatccaacgcacatgccatgccaccagcaatgcattccatctgagccagtagttccttcatgaacaaactcatcagatttacatacgaagcatctgaattcttcagccttgaatatattaccagctacgtcagatttatcatagatgttcataagaggtccttggagggctttcgccctcacagatatggttctaccttaccaaattcatggaaggcctgagatttcactcgagtgttaatacacatacgaattgatttcagaggttcattatcaccgaataacccacgtctttcgccgtctttagatttccaacgggcttgatttgggaaagcagcatgtagctgttcaagggctctattctgacgagcagtatcacgctgagtagagcaaccgccaggagactgcactttgccggatttaacgagatacttaaacagagccagatgaggatgacccatgttaattaattttagaaaagcataagcatcttcgttaaggtcaataactccgtaaccaatatcttctgcggtaagtttagtcaaatcgtagaaagtattggtgaacccaaaactattctcgcgataatgaccccagcttgatgtgattttgaaaatcggcaagcgagcatgaccgtgataataaccacaatccatagcagtctctacgtatttgaccatatcatcaaatacctcttgactcattgcctcgccgacaccaagtggaacacggcgatcgtcgcgttcacgaatttcagtcagatgaatggtcgtatcatcatcaagcatccaaattcgttgccctgcatacatttcagtaatcagacggcgagttcctgcaattccatcgacatcatcggggacagtaacgattttagcagcatgaccgtgccaagtttcgtatgcttctttttctgattcacgtactacaagatgcggaacataaccttcaggaaacatagtcagggcagtaactgccccggcacgcttataacttggaattacaaactgaatcatttccactcacctttatagtctttctttgcaatatgagtttcaccagtataagcatagttatctacaagatagaaatgacgctcatacacgtgcaaagacccgacattccaaataatgtcaccaactgaataatttttacctgatgcattcagaagtttggttaactgttccagaacatagagctgccacgcatagtcattacgatatccaaagacgacatcgttagaacgcatgtttacaacagcatgaactttattatcacgaatcagatactgaacattgttagtacacatgaaatcactcatgccatcgcgctcaaaatcatactgcatttgaggtcgtgtataaatcataattccgcggcgagaatcaggattactgataagttcctttgcgcagttagcaaactgcgaatagttttgtgatgaccaaactgcccagccatagttagaattaatctcaccatgtttggatgcaattgctttccaaatagctggggtttcacctggaatatctttaacgaataaactttgagatttataccactcaagttcacgggcaatgtacccatcattaactgcaccaaaaatcaggggctcatctgcaataaatgatgcacctacgatttcaatagtcttcacacccgtcttatcaatcacaaattctttgttgagcaaagcatcagcgaattcttgacggatatcttgtactgtcattggagttacaatcatgagacctcttatttaacttgctggataataattgtattctgctgtgcgttagaagcagaccaaatcagcgcaattaaccaaccgataatggaccaaccgaatactagatttgtgataaagattccaccccgtgatttatgcttacgactgcaagctacaaaggtcggcaaaaaatagatgaagaaaagaatgattaaaccaaatactgcttccatgttaatctcctcagttagacatgcatttgttgtagatgtgattttggagagattttaactgctccatacgttgtttatgctcattataactcaatccgccgttagcaaaatcagttaaacgaatctggtcattcactgctgccgcttgagcagtgcatgtacgttctttttgagttttacgcagacgcttaatttcttccagctcatgcttattctgctcaatcatgtcgagttccatcgcagatagctgacgattaggattagctttttctttcgccaaccgacgctcaaccgcgagcgattcagcagagacctggttgctagcacgatagtatcctacagtaccgccaattgctcgcacctgtccaacagaagaagccgggacgatatcaccttgtggcatttgacaaccagtcagcgtgagagcaacgataacagcaagtaacgatttcattgtaatctcctcagtatgttatttcgagaaccatggtaccacatccttgtggcaaagtaaacaacttttttaaaaatcgaacatgtcaagaagagacgatttctcttcatagtctaaccctgctgcttcagacatacccgtcagaggtttaacaaacgatttttggaacagaacactgtggtcaagccacactagaacttcctgtcggatttcttgtggcagctcagtgcccgatggccatgccatgcatttctcaccgtacgggttaccttcacgcagcgggatgaccatcaccttctcgccttccatgattggtgttataccttcaaagcccgcggtagctcggttatacgctaaagcacctttaacgtgatatggagtacctttatctggatatcctgcaccatcatcatacttaccgatgttgttggcggtcttaacttctgctattactttatagtcaagttcacgatactcagactcaaactgcttataatattgctgtaaagattcttcaccttcctgcagcatacgccgaatagattcttccaatgcattctgaacagcagttggtgtagaactttgttgagtttccatacccatgattttcagatgtggttctgcatatcgagtaccttccatatcatatacgttcagagcatatcgtttcttcgctttccagaatccgccgataccgtttgagcctaacggaggacaagaaatagcttcacggtccatgaacattaagtgttctttattgttcatgtattcacacatctcacgatacgattggtcaatccaaggctccattttcttcttgccgaattggttcaggaattcgaccaaatcgttagtttctttgaaacgctcaagacctactttctcgataaccttatcaacacaaacgtaaattgagtcagtatcaccagctactacaaatgaatgtccttcagtaccgcataccttgttgaggtattcattaactttacgttcaatccattggattgccatttgaccaaacaacgtgattgctgatgcgttacgcaaatcataataacggaagtaaatgttacccaatgcaccataaagtgagttgatcagaatcttacggtttaactggttagtgttacccaagatttcagcgtgtttacattcaaacatcagtttgtcaagacactcttcggtatatgtcagcagttctgctttcatgtcatcagagaaatcttcatagacattaacttctgtgaatttatcgatagttccaaacttcttatcattcagaacctttttaatcagttcttgatttcgtttggcacccatcattttatttttccactctttacgctgataaaataccttcgcgatttcaactggaatgacaccatctacgtctttacgatacatccaaccatttggtgaacatgaatattcgtcagacggacgaggagcagtcttgttaatgtactcacccaacggatgaagtttaaactgtccaacgatagtttctggtgaaatattgacctgtcggatgattgacggatacagagatgtcaagtcaaacgacatgatataacgatatgcagcaggaactggttccttaacatacgcaccaggatatgactgtttaacatgagaacgactttgcggaataaccttgtcttgttctttcagactgttaaagatgattgcgtcccatgttttaattggactcattacaccttgatacggcatcttcgcataataagacatcgagatagccaggtcaataaatccgcgaacagcatcaatcgcttgtactgattcaacgtcgatgatgttatacgaaatataccgttggtggttagtttcacgcaatttattgattggaccgtcatatgctaatttacctttcttggtttcataataagcaatgaaatccaacttatacgtcggttggttcgtgaaactaaacttcttatacaaatccatgtaatcaagaatagtcacacccatgatagaataaatttctttatcaccatacatgtttgtgataatcttagatgaaactttattcagaggagagaaccgtttcatcgcacgctcaccaagaatctgtttcacacgattcatgatgtacggaatatcaaatccttcaatgttccatccagtaaagattgctgggcatttctgttcccaaagattgatgtactcaagcatcatttctttttctgaattgaacggcatatatactacgcggtcaagaatatgttgtggaacttcatcaccgccttcggaatctaaacgagcagcgagtttcttgtcccactcggaaacagaaccataaagagaatgcagtaaatcaaatacgtagaacttatcatcaaccgaatcgtaatgggtgatagcatcaatttcatattctgctttcatcgggtctgggaattgagatgcagtaacctcaatgtcacagtttgcaattcggatgaattttttattatagacgatttctgagccgtatgtatcgctgatataagcaagtttgaaatcatccatacccattgcttccattcccatatcttccatacgacgcatccaatcgcgtgcatctttcatagttgggaatgtattcttcttacaatacttgccatagatgtctttgtactttgtttcttccatgcaatgactaaacatcacaggagaatacggaacacgacgcatgcgttcctcaccagtagaatcgatataacgttctacaatgtcattgcctagagattcaacgctaatataaaattctttcatgggtttcctttgtttatagaccgagttattagtctttaggtgggataattatactccgatttttataaagtaaaagggccgaagcccttttcttacgcaccgattgtgtacttagattttaaagtccattcatgcttctgtttgaatgtaattacccgaaagttattctgcatctgggcaagagtttgaccacgattaatactcagtagaccccagtcagcgagcagttgtgcgattgagtctcgacgaatttcatcttctaagtcaatagtaacagggcgaccatcaagctttaacatctctttaaaatggacgatatagtaacgaccctgtttctgaagaatgtggcagctttgatatagtaccttatctttgttattagcaattcccatacgggtcagagtttctttaactttcaggaagtcttcaggctgtttcagtgtaatttcaatcatctttaccattccaatgctgttttcttaagatttttctgttctttcacgtttttcgtgattgtcttgaccaattcatcagtcacaagacctttcattttcttgagagcaggtttaagcttgtttttagcttccagggtctctctatacatcctagcatcaatcgcattgaccttgtaatatgtcattataacttgaagaatcaatgcatcctggatgttttctgttaacttagcccatttaccatatcgacgacctctaggaacagaggccatcatatagttatagtgtgcttggtcagatagtccttgaccaacaaggttcataacataaaccgcaggcatgcagtcagcgtgctgagaaagagcgttttcaaccatgaattttgaataatccatagtcgagatattcaaatgctctttcttttcattaatagaaccgataatctcgaagaattgattttctgccttttctttatacgaatcagataattcctggactttcgcccagtctttacctaaccacgcgatttggtgttcattatactgatcatcatcttcaaataaactcatcatttccactgcatctctacaacaagttgaataagcatataaaccaaatgtaattcaatcgaagctgctatgccatgatactggttattttcaccgatgatttcatacattcggataatgcttgggccagtaaccattgtatacagttccgaagaaagtttatctacgaaccaagtatagtctgcagcatatttcggagcaagagcacggagttctttgatgttcttggttttaatagcttcaatgacatcttcaattgagccacggtcatttaaaacaatagacaagatacctgcatcaatcacacccttagaagaataatgatcaagcatgttaatggtcttacggaattctgggaaattctttttgaccaaagcagctacaactttcttatcttcaactaccacgccttcattttcacaaattgcgagacaacgcttgagcatctcgatttgcattggcttaacatcagatggagatggtttaccaaaattaattacacggcaacgagactgaagaggtttaatgataccgtcaagattgtttgcagtaatgataatagtgcagtttgtgctatacgcttccatgaatgaacgcagatgtcgttgagattctgcaagacctgcacgatcaaattcgtcaatcacgataattttctgcttgcctgcaatagaagcagaacttgcaaatgcagttaacggtccacgaacgaaatcaatcttacagtcagaaccattcacgaacatcatttcagcattaatgtcattacataatgctttagctactgtggtcttaccggtgccaggagaagtactatggagaattaaatgaggaatttttcctttagctactaaagctgaaaaaatttctttatcttcagcaggaagtacacattcagaaatagtacctggacgatatttctgttcccacatgaagtctgcttcatttactgtcaatttcatttatatttcctcattcagattaaagatggggccgaagccccgaagttattactcaaaatcaaaggtactgtctgcttccattgctactacataagaggctgatgcaccttcaaatttcgctgcagtctgtttcttggagccattcatttttgcccacagcatcagcttgtaatcaccaacagtcattttcatattgctcatgttgatgatgaagttgaagttaccttcgccatcataatcaccgagcgtcagagaatacttcggacgagtcagtgcagcatcttctactttattataaccacgcagaacaattttaccatcaacattggtgatagcaattgtgtcaatctgcataccacgagacactcgcatcagctgttgcaggtcttcacctttaaaatcgataattacgtttgccaccgggaatgggattggtttagtcgggaacacgattgtgctcgggtcagctgctggccagaagatagttgagcgagcatctttaattgccagattaccatcttcctgcatgataatatctgcatcatcaccaaccagagacagaatgctcaggaaactgttcaggtcataaattgctacatcagtatcgatggtatcagaaattgttgcttcagcataagtcgtaccattaacagcacgagtcatgataaaattgccaggtttcagcatgatacctgagttgatggtggagaagtttttcagaatgttcagagtttctttagagaatttcatttcaataccttttaattaagttcaggataattatatcaagctgcgaatgtagcagttaattcttctgcaacaatctgacctgccgcaacgagttgctcatcagcatctacacaataatcattttctagacgttcgccaccgtgacgatcagtaacaattttggcaccagccttgattgattcattgtaatgcttacgcatcagttcaatccatttttctgcgacttcatcatcgatagatttatagaaagcaaagcgagcttcggaatctttaatcttatctttgatagcctgtttagtttcttcggtcagagccagaacccaagatttacgaatacgattttggttattcgggttggaatctgcacgtacgtttttaacctggatatctttcacatcaacaaaattaatcattatatttaccttaatcgtaataatcttcaaccatccaaccgggattcctgctggacatgactctattatattcatttcctgtaaaagcatctcgtaacatttcttctgttactaagtgcttttcatcagaaaacaaattagttaacacatatcgctttacttcaggaaaggccaacagatgttggcccgtagtaaactcattcattccatcaccgtgaatcgtccgaccttcttcatttgaaggtgttggccatatgcctgcgggtcgtggtcacggtgagaaataataaacacattggcatctaccatcttattaagaatagcagttattgccttaacaccttctgcgtcggtagccgaatcgtagacttcatcaaggaacaaacagtttattttaacaccagaaactttttcagcaatatcacgccacgtgaatagtaatgctatatcaattctggctttttcaccttgactaaacgaggcataactaaactcttctcgtccgcgagatttaatcgtttcagagaactcttcgttcaacgtgaacgaataatcagcttccataatttttaggtagctgttaatttgcttattgaacatcgggatgtacttcttgatgatagctcctttaataccggagtctttcagcatttcagttaaaataccacgacgatatttttccataaccaaattagttttgacgagaataattttatctaattcttcttgtagcagttcaatcttgtcagagttatcaatgaactcctgtgatgctttatcaattgctgctttaatacgacgtgctttatcaactgcagttaaagtcatctgtttcaaattactcatttgatttttgatgtctcttgcacgcgtacgaatagtattatactcgcgagctagttcatccagttcactctggcgcgtctttaactcgccaagaatggtattacattcttcaacatgatgattaatcttagtgattagagtgtcattagaatgcaaatcctgcaagcacgttgggcaatgaccgcctttatcatacaacccaagaacctttgagtatgattcaattttagaacgaatcttaaaggttttaccttgaacttcttgaattgactctgctgggtcatcaccaatcacgagttcaagcagttcgctttgaagagtttctaattctgctttatatcctcgtgcctctttcacctgctcatcatacatcgcctgcaggcgagctacgttatcaccagaaagtttcttctgcttttctgcatactcatgatgagttttaatttcattagtcaatgcttcacgctgaacatcattaacctggatttgctgattgatttctcttatctgtgtcttgttcagtttgtccatatcagccaaaagagacacttcaagcaaatcttcaacgagctttcgtctattagcagttgataaccccatgaacggagtatatcctgccgttcctaatacgacaatctgcttaaacgatgtgtatgacatgccgatgagactttcaaagtaggattgaaaatcctttgaacttgcggcttcatcaagcttattgccatctcgtaaaatctcaaagacattcggtttttgtccacgtttaatgtagaaactatgaccatcatactccatccacagttctactacagagtccttcttattgaatgagttaattaattgacctttcttaatatcacggaatggtttaccaaataaggcaaaagtaatagcttcaagcatagtacttttgccaccaccattcttacctgtgattaaggtcttttgacatttatcaagttgaatgtcaatggccgcttggccaactgacattatattcttatacttgacacgatttagtttaaaagtcttcactgattttgtgcctcaatgtataactgtttagacataacctttaaggctttgatatcatctgcggacaggtcttcaagtgcttggatatattcttccattaaatccaataagcttttaacttctacttcttcgccatcttcagactcaaccgagttgtcaactttagaaacagttcttaattcatgtactaccttttcaagttctgattcaaacttaggaaggtcttcatcgaccgcagtgataataatgcgtactgcgagattacgaaactcttcaaagtcaatttttccagtaacaggataaatcagttttctatgccaagtgatttcattagggacgaaatcaaaggttgataattcagtgtcttgaacccagaagccacgtgggtcgttctcgtcacccgctgtaagcgtccaaggcgttccgatgtacttaacgtttgctgcgcttgatatggtatggaagtgcccagaccatacttgtttgtactttttgaggaaatctggttccagcccatgagacttcattcctttataaaaataaaagccattaagctcccagtgaccaatacagtattcagcagacgattctttgatatgcttcatgatttctgatgtgttctcttcacacatccatggacacaagtcaatcaaagtcccatcaaaatccatagtcacgggcttttcaataacagtaatatgcttatacttaccaagaacttcggttgatgcattaggcgtcaacgtattcttgtagtgcatgtcatgatttccgacgatcgtaattaagttaattccttctttctcaagagactctgcaatttcacgagcaaattccattgtcttatgagtgatagctttacgaacgtcaaaaatatcaccgtattgaatgatagttttaattccatgctttttggcataatcaatatgctgcttaattccgtgtcgttgtacatcctgtacccacgggtcatctgcgcggacacctaaatgccaatcgcctgagtgaataattttcatataacctctctagtagagtttaattttatattattccgtgaatagcaaaaagggcccgaaggcccattacttattttgtcattaactcaaattgttctttaaagcaatgctcagaatcttggtgttctaccaggaattcaaatgctttatttcgctctttatcatagagcttctggtcagatgacagatgtttcattcgttcaaagacttcatttttattttcatcattcaaccacagaatgccagaatcatgagaagtcaacggctttccatcaacccggaatttcaaagcatcaccagtagctttatggaacacaggaatagttccacaagcgcctagttctaaatgcgtatattccagcgaacgctcaaggaatttatctggaagacgtgacagctgataaccaaatccagactgagacatacgctcaagcatttcagagttaacatatcggtcaagaacttgaggattcagacctggtccagttttaacctgatgataatgacggcaataatcaatttcatagcgttctttaatgttaataaacgcaggactgcgttctaacccttccaagatagtcgttttacctgcgggacgcagatgactttcatgaaagtcaaacatcaagaaatagcctttccacgtagtagtacgaccaatccaacgatgaatatcaaaatcaatagcagagaagtctttccaatacttatcacgaattgctttgatgttcatagcaggttgaaagttataaaccggaggagctgagtcagaatcatcaaagaaactcaacccgccgcttggaaaatattcttccattagcacggtattaaaatcgccgtttgagctatgactaaacagtacatcagcacgcttaacggtttcttcaagaccagcatttctacgaagtgacaatgctctatggtcatgttgatatacgactacccgaacctcgggtttaatgttctctatgagcttcttatagttatcaatcgctgcttctggagcattgatagcaggtactgagttgatgataagaatgtcacatgcattaagcagagataaggtcttatcatagtcatctgccagagacacaggaatagttacatctttatagctatgtgctctattacgagtaaacgctttatctttagcgtaaatgatatttacttcatggccatgttttactaaccactcacgatgctcgagactgaacttggttacgccgcatccctcaagtccgcgagccattaaaatattaatcttcatatattgacctttgttgttaattttggatattttaccattcccgtaataaagcaaaagggccgaagccctttaaattttcttgtatacgacataacccgccgcttcacatatacgcttagcttcttcaaagcgtctaagcatatctaccttggcattatgaattgcttcataatcgggagcaggtgcttctctcctagcggtatcacatttataacagaagtaactacgctttggtcctgtataacgttctgaacaattactgcaccggcacgtgtaatttccttccggccaatcatgtccaggattagaacccatcaaattcgtcatacatcccaattctcttcactagtaataaaatcagggtgttcatctaaatcaatgaatccccagttctcttcatttaccattcataccaccgtttaacttggaaggtgtcaacccagacaagagagttcttatctattagcttacatccttcggtagagcctaacacgcgatattgattatctgctacctttactgccatcgtaccagtcgcagtgtttaaagtaaatcctgcgtctttacgaacacgtttaaattttacttgtaccagcatttagaatgtcccaaacagatttacgagaggtattccaacaagtcagaataatctcatcattaaaaggttgttttaaaatagtacgcagtttttcaatagcatacttgtaagcagggaaattattgtctaataccgcgtctccagcatgagctcgtaatcgctcaagttcacgacggtttttacgaacaactttgttggctcgagcaatagcttgttcttctgccgcttccattagtttctgttgcagctcgtcgcgctcttcctgggtaatattgttcatgttattcctttggatggtaatttatttcaaatgtgaattcagtatcagtccaattataactatgttcaattatagcagaatctgacctgaaatcagcgtcatgtggatttttcgggtcaatgtgaatatcaagatcaagcacctcccttaaatacatctttagcaaataagggatagcgtctaggtcttgcacatcttctaaaaacccgtcgaggttaatcttcagcctcatataaaaattccagattaggtccatcgcttgtaggttcgctctttttagcagaccctggcgccttataagcggtggattcatactgcgtcattttatcgtagatgtcctgaataaaggtttcatctgctaacgcaaccatatcatcgtcccgtgaatcatacacgttgtggacaaaatagctgtatttctttgccatttctttgcgttcttttttgatacgctgaacgaatgcattgaaacaagcttgggttatatacgcatgcgggttatcatacttagtttcatcgaagttgattaagcctttaattgcggcttcaatcccgtctgaaatcatttcttgcttccaggattgggtgtatcctgaaaagttgaaacgcttactcagaccttccgcgatcagcataatagcaaggccgatcgtatcgttctgttttactactcgagggccgccagcagcttcagactcccggcacttctctttccatgcacagattgatttatacagttccttgttatttacataattactcatattgcctcttcgcttcaattaataatatctattataacaaatttgggaagcgagaggattaaagcattacttaatcaattcagcgcatgcaattaatttcatcatgatacgataaaaatcgttatatgtgaaatttagcggaacatcaataacggcttcaaaatcttcaaacacccgctccattccataaccagcgatatcatctgattctgcataccagtacgttccatcttgtgcaaaagtaatttggctattttcaagacaaaacacaccattgatattttcatgggtaagagtcagctggattttcatagttcacccttcataatgcgatagcattggaacagctgttccatgatacgtttgaactcaaccaaactaagttcaaaccaatcagattcatctacttcatgcatcatttccatgaatgaagagtataaactttcataatgagtttcatttaacatagaggcatgcgtttcccaatacatgccctcttcattgtcaaaccaaacacccatataagaatctatagtaaatccgccaatgccttctaccacaatcataatttggtttattttagccatgctttcaccgtatcaatagcgtcttcaaatttagagaaagcatccacggatgtgtattcattctctccagaacgttcataaatccaaaacgcatcaaaatcttcttcaataatgaattctccgttaggagtttcaatattgtttctgccatcaggcgttttagatatgaaccatccaagcaaaccaacttctacaatttgttcttcagtcatttagaatttccaccaattgattatagtttaatgcctttccagaagaaatcataacattacaaaatctgtataatgcttcttttgatactttatacacataatcagaagttgttataatgtatgaaatacgtacaaatgttggggatttttctgccaattcatacgccagttttctagctctgccaatatcatcggcaaacttggtatcagcaagcaaaatactatcaaatacccaacggttagtaaaaatttctgtgtatagaataaccttacgcatcaagatactctcgcagttcctgctcgtttaacccttcttgccacatctctgacggagatggaagttggctgtctagagtggatgaatcaattggaaatactctgataattacgctagtatcttcatcccattgatttgcgagtatccgtttagcttgactaatgtcaggctcagaatgagcccggatatacttaatccttctatgccatacaccggtaggaatagatgcgcacacgatatatgaaatcatttcgccgccttaaccgctttaacatcgcggaagcctttcttacgttgattcttcatcttgcgaatagtgctttcagaaatttcaccgatacccggagtgattggttctacaccaaaggctttgatgccaaattcagacagaagataagcaacaactaattcacggatgcgagctttaccaattttttgaccttcttctttcatcgtaccgtgaagctcaacttcccactgatcaagcaaagacggagttacacaacgtccttcttccagcattgcagatactttatcataagcaaaagagttcagtacgtttttgattgcttgggacatattaatttcctcagtaacgattgttttgacagaggagattttaaatcaaatctcctgtagcaaatcaatctttgagagattttagctcttcgagcatatcgtagtattctttactagcaaccggagctacagtgcagtggtagctattgaattcatggtatttcacgaagcgttctaggtgccacttaatcagattgttaattcggtgaagcagaaccccatctgaaccgacgtagacaactacttcaaattgaagcccatcccaaattctggtacggacgatatcacctacagcaaaagttttcatgcgatgtaccaatgttcgttttgccaagactcacccttgtaccagcgagtcatatcatatccgttttcgtcacagatgaccttgttcttcatcaagaagtattcatcatcagtaaaatgcacatgctttactttacagcctttactcatagcttctagagcttcttgccaatttaaccagttcatattttcctctcgagttaaacggtatgctgttatccgttgatagggctatagtatcactcatcagctagcttgtaaacaactttgtgaaatggatttaaaataaaagagaggtcccataggaacctctaaatgaagggtatagaaatatacagaaggtggtcaagatgaccttagaaaggaactggttaatcttctatgatatctgggtcatgcccagcagcaataagattggttttgaatgttggaatgtcatactgcttaacgttatccataaaaatgacaggataccgaatagcaagcgatggatagcacccgatgcgtttagcaagtgactcaatcaacggacggtcataaaccggttgaccgtcaacctcgttgattacgttatagaactcatacggaagttgcagcttatcgagcaagtcacgaactgctttacatccagggcatctccaaacttcttcagggatgccatagatttctatcatttcatgacctgttggagtttagcagtcagagtattaactcgtttctgaaattcttcattagataacttttcatctttcttggtaggattaatccaatctgcgatgataataaggacaatgaacggaattgctacgaaagcacctgccgttaatgcaaccaaagcgataacgttagaaataaatttacgaatagcattaatgaatttcataattttccttaaatagtaaagatgaacgttgtcatagccagaaattccggtccaaacagttcagtagccatgtggttcagagtaaacataattttgtaagtcagcatataaatttcctcaatcatgtgtccaggtagaaccatttcttacccagagtctttggttgtcagaaccacgccagtttttagtagttggcagtgatttctcatatttcccatcaattataacatcgatgtgttgtagcaaatctaaatctttgatatcttcaaacttatatccggtccacatccagatatctttctcaggaaatcttgctttaacccatgctaccaaatcagatatctcttctcggttctgtggataaagtgggtcaccgccggttaaggtaagaccttgaatatacgatttgcttaaatgggatgcaagctctttaacagtattcatagtgaatagctgtccgttacgagcattccaagtagatttattataacacccttcacatttatgcaaacacccagtgacaaaaagaacgaccctgcatccagggccattcacaaagtcagaagggtagattctgtcgaaattcattgaaccttacctcattacgtgcttctacttctgcatcatatttccagggctcatcagtttgaatagccccagccgataatccactttcggggtcacgggttatagcaattccaagcggatgcagaacctctttgttgattttccaaatcaatccccattcgctaagttggttccaatcaacttgcttcattggtttctctaacatgttttaccctatgcataatttctttgttcttaccaagattgaacccacgctcagaaggattaccaagatagccacaagtcctacgaattgtattcattttctttggatcagtttcaccacaaattgaacacgtgaatccgttttcagtaggtgtcatctcatgagtagaaccgcaagaaagacatttatctactggcatattaacaccaaaataatccaacttctcaatagcatagtcccataccgcttcaagaccttcaaggttacgcttcatgtcaggcagttcaacataagaaatatgaccacctttagcaatggaatgatatggtgcttcacggtcaatcttttcaaaaggtgacaggttttcttctactgacacatggaagctattagtgtaccagcctttatcagttacgcccttaacatcgccaaacttagcttggtcaatcttacagaaacgatagcacagactttcagccggagttgagtacagactaaaggcatagccggtttcttccgtccacttatttagcttagtattgatatacttcaggacgagtttaccgcttcctttgaatgtaagcatatcaaattcgtggatgccaatatatcctaatgaaattgaactacgtccattcttgaatagttcaagaatttcatcgtcaggtttcatacgcacaccaaaagcgccttcctggtaaagaataggagcaactgatgcagtaacaccttcaagggatttaattctagttaaaagagcatctttacaaatatcaagacgttcatccagtagtttgaacagtttattactgtcatctgaacttttataatttgcatccagagctatcctagggaggttcagtgttactacccctagattattacggccatcaagaacgggtttgccagaagagtctctccaagcaccaaggaaacttctacagcccattggagatacaggagtttctgaaccggtaattgctctattatttcgagcactgatgatatcaggatacatgcgtttagctgcacattctaatgcaagctgcttaatatcatagttcgggtcttctttacgtagattaatgccttcttctacaaacatcacaagctttggaaaaattggagtaattccatcacgtcctaatccacgaatacgattatcaagaatagctcgttgaattaatttttcttcccatgacgttcccataccaaatgtgatagtcacaaacggtgtttggccatttgaactgaacaaagtattcacttcatattcatacgcctggaaagcatcaaacacgtctttttctgtttttgaaatagcataatcttttactaatgctacttgatatttgcgtgcatcacgtacatgtttagcgaatgtcttctctacataaggagccaatactaaatcgacgttagcaaacgtagttccaccatattggtgagatgctacttgtgcagtgatttgcgccataatagcagtagctactccaatactcttaggagtttcaatttgagcgttaccaagtttaaagccattctgcaacatacctttcaaatctactaagcagcagttagtgaaaggcaaagctggactatagtccatatcatgaaaatggataacaccttctttgtgtgcttccattacagaggcaggaatgacctgattggcgatatgtttagatacgataccagccatcaggtcacgttgggtaggaaaaacacgagaatctttgttagcattctcgtttaaaaggtccttgttggttttattaataagtccctggatttctaattcgatattcattttaaactcttacgaagctgcttcttgtattttgaagcaagttgtgattttccatcactttcctcgtatgtaaacccatgcaattccatttcagcaatcatctcaggcttaccaagacgtgaaaagcgtttagccatatcggcaacatattgcgggtgaatattactgtctttacgattctggcggagatagaccagcaaattctctaaccattcgaggtagtcaatatcttgaccttttaaaccagagcggttgaacttatgcttcatttggccttctgccgcattacacaggttacagagcaagcctctgacctttcctgcattgtcaccttctaacgcatggtcatggtcgaggtgattcttttgaatatcctcatctaaaggacgtttgcagcaaggacataatccgttctgtgcctgatatagtttttctttttcttctttatataacttaccggttaataacatactcttacctcagcgattagataagagtatttatagctaaattaacgagtaactactatagatgttatgattagactcttttatgcagaaagaagtacagaaagcatagatgccttcataatcatccgcattgaactcaatatatgaattagtttcttcatgaagaagactcattttagtccaagccattccattgatgtcatcgtcgtaatagcctccactaaattctactacatcgccaacttcataccaatgactgcgtaaaatttctcttgtaacacgatgaatatcagcgaaatcgagaatttttactgtaatagttttagtaatgcacgatttagacatggcgaactccaagacgttgttcaagtgcgacgatataatctgctgctttttgcattaaagcatactcttctgaatcgcaattttcctgtccagcaaaggcataaagagctctggtaattggaacgattgcaccttggaaatggttaagtttaatttcagaaatcagaggaacatcttcaccttgaccaatttctttaatttggtgcatcgtatcttcgctgtagaaacaccagaaccaagattcgccgtgtggagttgggtcattaattgtgatgattttatttgtgagcaaatcaattactgctgtaatgccacatgtttcaaggtcatcttcattaactgcattgataacctgaaatttaaatccaggaacaaactggggaaattgttcagttaattcatcatcattttctataacttcaaactgcttaccaataagttccattcactttgtcctcataatcaagtagttcgttaatggtaggttcagaagtattataatcttcttcaggaatagcatcttcctctggctcgacagtttcccatcgagccgtgtaccaaggttttatgcctttgctgctttgcatggtgccggagcggaatcattaacagaatcgtattcaatacgccattcaacttcagtacgagtaactactttctcgtgacgagtgacgatatctacttcaggaggattataataccaatcggtatgatatgaacctgaacgagactctgataccatgaaatggacgccgcgagctgggtaataccaaatctgagaacggctttgatacttatggtcctgtgtccaatctccatcttctactaaaacaaagatttcttcctcttcatcatcaccgttcggtggatattcgaaatcatagttgtcgtcccattcgccagtgacaccagcaatatgtttgatttctttaagcaattcagcgttagtcattttagcctcgcagtttttgtaagtcttcatcatcaatccagctttctaaaccagatggaagtgagcattcaatttcccataacagttcttcaatagcatggagacgatcaatctcttcagctggaactgttaccattcgtggagcttttaaatcaccaatatcataactcataactcttcctcatgccaagaacaatcaacttcaaaatctggtccgagctcttcatcttcccaacgccaagaccctaatggattaccagcatcgtaatcaacttcaagaccaatataactccactgaacaccatgaatgatatttccttgctttacaaagaattcaccccattggtgcatgaaagcatactgcggatcagatatagctctttcaatcattgcttcacgaagattacgttctaaatctacttggtcgccttcaggaaaaacaaactcaattgggtatttcataatttcaccatacactcgccgtatttccatttagacataactttaactccattagagtaagttacctctaccttcgctcggtgattcttaatctgcttaatttcaccggtttctaatccgccatagccgtaataaagagctacaatatcaccctcccgaaggagggttccgcgataatcatgcattgaatttgaatttacggagttcatcaaaaccaccgatatgtgtaccgtcaggagcaaaaatctgaggcatagttaatccaacctgcgattcgcgacctaaacgacgaagcaaatcactgataaccacttcatcaaatacacctttttctggcattacattgatgaatgcatattcttgtttcttaacgtcaagcagacgctttgcattatcacaaaacacacacttatgaatgttgctgtcgtaaccaaaaaccgtgaacatcttcttctatttccttaaatacttgagcttgaacttggttccaactcgggtgtttatacgctttataaacgttagtcattccaagacgcttagtgacttcgccatcaattgcagcttgggcaaaatttcttccacgggtcatagctcctttgagattggaactgttagcaatttgaccagtctcattataataaaccgaatacatgagtagcattactcgttcggcttcttccatatatcgtttacgagccattttcagccttagtagttataactaatgttttaccgtctaacgcatcgagaatatctttgatgcaattatctggcattggttgaacgctagctaattgcttggcaatatcatcaggaattcccatgcgaggaatatttaatttgctaaaatcaattttatccattagcagttaccgggaagtgttctgccaatttagcggcgatggcagagttaatttgatcagcgaaattcttattcattgcgttaacaatgatttcttgaattcggcggttagcgctttcaatagacagcttaatacgaccttctgcttgctcaatagcatcatcaatagtctggtgaaccatttcgctaatagcatttttagcacatgattgggcagcgttacgcatcatctgcgacatttcttctttggcagacatatcactccaaccacgagtatggaacatctgctgaagctgtttcttaacttcagctcgtacatctggaatagttactgttgcaatattaacttcagattgtactgcttgttttagtttattctgggaatcttttaacaccatttctttaacgatgttattgattaccgactgctgaagctgggcacgagcttctgtaccttctggaaataactgtcgtactgcatgtgtatctaatttaatgtcaatcattttacctttttcactccaggaatattagagatagtttcaaatacttcgtcaaagttatctttatcaacagtgactaccatagtgcgagcggtctgtttctttttccaacgtttaaagaaagtggcaagactcaaatcatgggaagtgaagaaatcatcggttttgtaaacatatccgctttcaatttttactaccgcatcaggcgaagggtcttcatattcttctacttcaacatcatcaaagagtattaaagtgtcatcatgataatagccttcccagaaggcttcatcgttataaaattctttccaaagtgcgccagtggttttcatttaatcaccttcttccaagcttcgtgagcagcacacgctaatacttcgtcatcagtcaaattgaacttgccttcattacgacgagcaatcatttcattgaattcagtatcagttctaagcatcatgttaagaactgtaaaatccattgtcgctcgaagatattctttaagctgcatagggtcgatgccactttcgtatgcgtcaagaatcatatctgcaatgatgttatcaaagtttttgtcttttatgaggttattagcatactcgacaaaaaacttagtattagcaccagtaatagttttagtaatcattttaattttctctcaaatttatgcttacaagtccggcatttcattttcagaatatcggttgtccaatcaacaagctgtacttgaatactaccacatttttcacaaggcacaacttgtttagccgcagcttctcgacggtctaccatttcaagacaggcatcccagtcaattttaaattcaggtacaggtggatactcaaactcaatttcaaggtcgttatcatcaacgaccatgtcttcttttaattgatttttcacagtaagctccgggcatactcgagagattcataccgctctttgtactcattaagcgatttgactaaatccgccatcatcaattcatgcttacttaattcagcttcttttgtatcaataaaccgcttaaccgattccatttcggcagtaatactattcttagcgatttcaatatgatttactggtgttaacggaagaggcttaataacattgagatacatatgtgctacgtcttcatcaataactggggtggtgctcaatgttttaggaaaaatcttaaatgggtccaaatgtacttcaagaacagatgagttttcaccttgctgtttacagcatgattttttaactacatccatatgctctaatgcagtacgaacttgcgctaaaagcgcccgagccggatactttccgctggacaaatggctattaatatgaattcgtacagttacattgtcaagttcttcggcacgaataaatgaaacacccttaggatttctagaactagtagaagatacctggtatttcacacggtcatcgcctttaagtaagcaaattgaacgattaagaatacgacgcaggtttgcattaaattcagaacagaagatttgggcagcgctgcggtcatgtctttcttcagttttaaacgcccctgccgcaaagctataacgctgaccgtaaattttagcattgccgatagcaaactttttgagctgcttctctgctgacattgcacctaaccagcgagaacgacgaatgttttctacaacaaaactaacatagttggcttcatgtgctgccatgctatttagcacacgacgagctacgttaccagcaattgctacgttataagcagctggatttaaatcatgtaaagctgccaaaacctttacgtgcttctcacgctttgacaagccctttccattatgcttatcaaattcaccggctacaaacatctttaattcattcttattcattatcttttcctctattttggactgggctcaaagagtatctcaaaatctccctgaacccattatacaacaattattcctcaagcattataactttgcttgggcgcttatagaaagcatgagttttatcatctttcgctaattcaaatgtagcagtaaactgtactttgcctctgtattcaaacggaatactttttggaagggagccgtaaaccgtagctccattctcaagtacaaccatcatcttacattgtacgccgtaatagtcttcataaacttttactgacgttactgtaccagagacagtcactcgtccttccggtgcatcccctttattcttattcagctcattgaatatattatcaaagacctgttttgaatgttcctggatagcctctaagatgctcttatgggctctaacttctgccataacaacatctgtgccatcttgcaatttccactctttatatggaatgcgtacttcaagaggataaccatactcacgaagttctttatactcttcttgagttaagcggagtttccaccaaccgtggtcacctgtatactcaggcttatccagtgaatcaaattctgtaacatacggcaagtagctgcctgcgtgataagcttcaacttcacctaattcattttcccaaagataaccatcaaagggagcatgaggacgatcatctttgccccaagtaggagctacaactttatcaaagtattcacgaccgaagcgggtcttcgcccatccagcattcaactcctcggcgcgtttttcaactttcgctcggtgtgcttggcgggctacacgattttcttcaacaagtgcagagataatctcggttaaagttttcattttattctccagtttggttgacgagaccatcttatcaacagcctcgccgaaagtaaactactttgtgaaaaattttctccaaagcagaactgcatctctacgagatacttctactgctcctagagcaactgctttcttgcggcgaacatctcgtaaatcgtaatgtggaactcgcttatcctggaaccaagaacgtttcattccgatggcttctgccatagcgtgtaactcatcaaggttgtcgctaaacatatgacagttctttacttggtaacctctcattttccaaccatgattcatcaagacatctacgtatactgtcatttctgattctcgatgtaggtttcaatgatgaactgtgctaaacacagaagattatcttctgaaggagaatctactaaattctcaaccatttcagaaatagttccaaaagcttcttcagtattgaacatttcttgaagttcgttccaagtaggtgctttcatttcaatctcctcattagttaacggaagctatcttatcatggcttttctaagatgtaaacaacaaaagggcccgaaggcccttaaaaagatcggaaatcactgttaaaccatggcgactggtgctgtcgccgcttaagcaatttcagttggtatttcctattgtcttctataatcatcttagaggcttttagctcttcagccaatgagacctgtttacggtccatcaagatgaggttctgggtcttctgggcaaacgtctgaatacctttgagacattccacagattcctccatccctcgtttatacttggttcgggcagcatttaactgcccttcgtaatacgcatgtatagacactatagtactaaacacattttacctcaataacatctaagataatatcttcaacgtcttgctcagggaatgccacgccattggtctgcccatgctgaaatactgcttggtacgctgacggcgcagaaattcgggttgaacgttctttattgtcatagcatttgccatcaataaagcgtttaaatttaacttcataggtttttaacattattacaccttagcataattgacgatttgttcacgatcagcgggccaatttaaatcagaacgtttcttgtttgaccacgcaatattttcttcagcccaatgaagtttagccgatacgctcttttgtacgtctctgatggcttcttcaagataaatgcctaaatctctcgggttagttccttgagttttaaatgcattgagcaaaatatttcttacaacttctttaaattgattttcaacttccgggtgaataaattcacgatatccgctgcacggatatccaaaagcatctaccatacgagcagtactaaattctttgttcataatccgagcgcctcgcgttcatcaggatttaatttagccaaagcggcttctttaattttttccaaccgtttacgcttagcttcaggtgtttcttcctgaacactaatagcagcatttttagggaatgtccatgatttaccgttttcatcggtgaatgtaattagttccgttggcttacgattaactgtaccatctgagccccaccaagactgccccttaactgcttcttcggcaacgcaatatgaaccataataaccaaacaactcactacggcgatcgtctggtgaaacatacgctgcataggcttcactttctgtcattacccatttcattttagcacctcataacgaataagttcaatacggtttttaagctcttggtatgatttacgccaaggcttataataagcatttaaatcttggtgctgtttatgcatttcgtctaaatgctttactgcatcctgcacatttgcaaggaaagtatcaaatactttattagcgtattctttcctgagctcaatgaatggaggagcacgaaatacgtttaccattacacgcagttcatgataagaagaatggacttcagctaatacatttttcttatcgccaaaattaaacttataaagtttttcacagattgcttcacaggatttctctgctttacccttgggtttacccgcaaagatatgaccaggcggatatactttaatatcgtttaaccaacattcaatatctttaatagctgctaaactcattgtacccacgctccgttttcatcaatgtaattaatccactcgttaatagtccaggaagaggtatcacctttaggagtatcaacgatatacattccgcttttaaagagaacacgttttacatcattagaaattaaagtagccattatattttcctcaataagggaggatttctcctcccattcaaattatttcagcattgttacttcagcaatttcacgccagtttttacggtcagtcgcgacgaaatcaccgatgtaaagagcagtacggagagatacgttacgcagacgatttacattgtctttcataaattccaaaacttcaataacttcggaatttcttaacccacggttctgtaacatagaagtagtcattattacatcttgaactcggaccataatctcttcattagtgtgaacaccaaggtcaagataaaccgaacgtgataccaaagcttgaagatgcggagcaagtttagaaccgcgctctaattcacggtcaatatcaacgttagtgataaagaccacagtaccttcaaactcaaactcattaggaattcctttatcttccaagaaagaagatgcagtgctccagcaaactttccgtttctcccctgaatccaaagcagctttcagaaggttaagaatgtccatatcagagaatacatccacatcgtcaatgagcagaactgaatttgcttcacgtgattcccagagacggcagtataaaccaattcctgagattttaccgttcactgatttgtaatcaatagcgttagtatcatgagcatgttgtaatgctttatccaaagagtaagtcttaccgatacctgctgctccggagataatcagagaacgaatattcccatgaattaagccgttagtcattaatcccatgacgttaaagcgtttcttgatacgctctttcatttcatcaacggattcaacaacttcaattttagcagctactccgtcaattgtgatatcatctttgaatacccaaacaccacgctttttgccattcagttcaacaaagactttaccatcaccctggcgagaatcttcagcacttaagctatccgggaaccactcaccgagtaactcataagtacctgaaatctctttgccgaagtaaatccctttcttgatggtgatagttgacattttattctccgttactctgttttgttttgatggagctatagtatcattctacagctccaaagtaaactactttttaattatttttctaaaatttcattgatgtagtaaggacgaacctttgaacctagatagaagtcatcaacaaaatcaatcaagttgtcagtttcaccacggatgatagcaagtttagagaacgcttctcctaccatcattggttcaaattctacgccgtgggcttcagcagctttaaaagctttatcaatgttgtttacgacgatttctaaagttttcattttattctccgttatctgtttgggtggtacaggtctatagtatcatcagctaacgagcttgtacactactttttcattcttttgaaacaaaaagaggagcccgaaggctcctcagttatgcatgcttattgatagcattttctgctatgcgttttggaagtttacctgcccagcggaagaacatgataatcgctccggcaataaacgcagggaaccaaaagatgagataaaaccaatactctcctgctttctcgatggttccatttttgattagatgcttacagacagaccaacccacgacaaagtaaattattgcaacaacgattggcactactacgctccacagtaaaatcatatttcagcccaataaagtgagaaccggagctcttctccggcccatgacataaattggtggatttgttttcgagttggtcgagcagagaatttagcattttctctacgaccagtctctctgcaaactgcttccaaataccaccgtctacctttatgaggtcttccgtaattcaagaagaccttcattgtatcatttgtagtaagaattgtggttttcaagataaaccttctcgacgaaatcgtcccagaacttcatgtctactttcttaggcagtccgttcttctcggcttgatgagccaggcgttcaactgcgtccacggtcgtttccaaaatatcctgaacttctttgaacggtaattcacccgctttgattttcttgatcagaggagcatgcaccagaggatatttaaggtcaccggtggaataaatttcctgtaactgaagaccaccgcgaagggcatggctcagtgctttccaatctacaccttcattagcttctgccttacgagcacgttcaccatattcagcatcaagcttctcaagagagtacttcatttctttaactgtgatagttgtctggaatttacgacctaacacgttatagaaatactgctgacctgatttatggtctgtaaaggtggtccactcaaggaattcacctaccggaagacgatcggcgatgtccttaactttccaacgctcgttaatgcctttctgcttgggacgatcgtcatatttccactcaggaatatctcggataacatccaggactttatgcaaatcagctaaacgagaacccttaacgccatacttacctgcttgcttacggacatatccaagataagccttcatgtccgtggtatagaaacgagctcggttgtcttgaatgaatttccatacttcaggaaggtcagatgcaactaccaattcaggcggagtatgcagcatgtccagtgcaactgtttcaccatcagcagcgagtttgaagaaatactttaagctgaacagctcatggtcaatatcgtctttggtatttttggttgcgctgttgttagtattacgattggtgtggttcatcgcctgacacattagaatatcacgcggatgaggcacaaagatttctttaaaatccacatccgattctggagttgaagtaccatacagatgtgaaccaaaataagattttacgattgttttcataagtaaatatgattccctttagcgaatttaactaatgcattagaacgcttgactgcttcttctgctcgagttttatctgtagttctttttgatgtacggtaaacattaccaattttttgactggtgtaataatacactacctcatgagtatgatactcttgtccatcaggatgctgctcacgacaagtttcttcacgtaatgttgtttcatacataggaaccaatgcccaatcaattcctgtgctaatgattgccacttgaatatcaagtctgttccagcgaaatgcattgatatatcctaggacccgtgattctgggtccatcattgcgaatttaatgttttcggctgaagccagaggcatctgttttacaatactcatactaagttttttcttagtagttacgatttcaatttccataccccgccttcataatatatgtctaaatcaatattatctttgccgctgtacttgccagtcaaaggaataaatttaacagtaatcttttcgccgtcatcaaaagtaaattcggcaataggacatgtagaaattataccacgttcggttttagcacgaaagacggcccgaaggccgttcacaatataaacttgatcattcttcactaggttcacctactgtaatgtctagcattgatttaacgagcgagatgtcatttgtactaaacacgtgagcttttcctttatcgttctggcaaaacatgcttccatctgctgcaattgctagtacttcatagcagttattagttgtagagaatttatcgcccactacaagaggaacattaactttacacttctcataaactgtgtatttaaggctgctgagattaattaccgacttagaaccaccgggtaaaagtttacagatataaaatccatcatctgaagactcttttaggtaatcatcgatatacattccacggtaaccatctttaggatataccacagtagttgtttctcggctaccataatcgtaatatactacgattttgttgtctttacttttaaagaaaatcgataccgtatgcgctgagctgcatttgaagatagaaataaattcaacttcaagctcaaatcgattgctttggttatcaaacccaatttctactttatcaccaacctttaagggtttttcaataaggctttcttcaaatttcgtgcgaataaaacgtttcatttatcaccttctacataatcaatcattgggcagactttccgcttacgggctttcagatactggacaaatactggtggttcggcttctgctggaagaccagcttttactcgagcaagttttttggtatactgtttctgattgcggtagtgtttaaatttttctaaaccaaaaataaatccaaaagctatagctgcaaacaaaagcacaaatgctgctataactactgcgccaactggtactgctataacatttaaccaaagcgcagataaactaatacctatccaagcgagaattcctgtctctgccacaatcggccaaccgaacatccatgcaacagaaccgatgaacgtgataatcgccgaagaaaacacaacatgaagaactgtcgtccagaagtatccacatagagtttttggcattttccacatgttgtcagatttaaaccacaggttcattttgaaatgccaagagtttttattgatgttcattatcagtccttcatagtcggaatcatagttacaagatattttacgagctgttcagcatcggatttatcaatcatcaagatagtaccgttgcgctcaatttcaataagtgtagaaccgtatagctctacggtagtcagatgcaaatcattaatgtatggactttcgtcctcaattactgcatcgcctttacgggattttccgtcccatactaatttactcgccatcttttgcctctatcaagaattgaattaatgaatcaatttgtttagtatcaagatgaattatatcattgccttgttttagcacgatacgactcaactttttagtgaaatatgaattcaccacctttacatgcacatcgctgtacggattatctaaattggtactatcaagaatactttccataattacctcaattgtgaatcttttgaaccgcgacgattataggcagaagtcattactgtatcccactttccttgacattctacacaccgttggcagcctttaacaagaaggcgacgagctattggaatttcctcatcacagtcaacgcaaaactcttcggattcacgttgttcttgaagctgtttctggagacgggcccattcaatcccgtctgctatagtggcttcacgagttgcgaagccgtcatccgatggaccccatccgttcatttcaaactcgctataattaaatcaagcaaatcgttgacaaagttgtaagtaaacatcggatattgatattgaactaccatgtataaaataatcaagatgtttttcattcttcgccatcatcaaagtcgtagtagtcgtaatcgcaggaatcaagataagaatccgcaaattctttctgacgacggaagtcttcaataggagttaatctgtcagcgtatgcttggtcatctgggtcactgaacttgtcttcttgcagttctttaatgaactgttcagcttcttcacgcgtccaaaacccacgattaagattatgaaccgaacgtttttcacctggcttgaatacgcccatatcatgagcagaacgctcagttgaataactttcagtttggccagcatagttttcatattcgcaaatcacctggaagaaaggagattttcgcgaatacacaccacgaagaccaagttcaacatcatacgtgcctgatgcaacaatgtaacgcgaaatagaaccagacttggtttcagtgcgattaacaccacacacgtgataaaagatttttccaggttgaagctcggtagttaacttaatcataatgtttttctcgtttggttgttgatatgtctatagtatcatgtaatgaagggaagtaaacaactttttgaaaagaaaatgcctcccgaaggaggcggagggtattactgcaatgataacaaatacttagtcttgtagcatagacctgtaatgtcatccagaacactttggagggcggcaggaactgacttgtagataccatcggccttagccagaatgaggtctagcatttcaatggtgtcctttggcagctctttctgtgatggtaaagccggtgtataactcttacctgagaatcctaaccactgctcaccaaaagcatctatcaaatctggaatctcgttaaagaaaacttcatacgctttatgtctggcatacgatttggtatcaaaatgcgctgaatgaaaatacgcctgagacgccataagtaaaccgatgaattcatcttgtggagtaagtttaccgtcctttacaaaatcattgaacttcattatcgagttgtatcctcatgcggttagcatattcttcacctgctgaacgtcctaaagaatcgcaatctttagaacaagactcgctcttccatttactttgtatgaaagaatagaactgttcagactcttgcttactaggctccttaaatttagcataaacttgtagagctccctcaacatacgagttataatccgaaatgtcgttgtgtgatgcagctgggagtgaaatcccgcagcccaacaccagggctaagcaaatgtgattaaaggccatacggcctcctattatttttgtccagtattacgtttgtgctgaagtacagccttaacttctttgaggtatttttccagcttacgtttacgggtataatctgcttttgaactatgttgacgaatttcttcctgaaggtgcgaaataccatgcccaatctcacgacgaagttcgtccagttgttctacagtaagattacgaagttgcttttcacttaaatgctgcatatacacctcatcagttagtaatagtatttatataagtatgtgttacttaatcccaaagccattcgcagatgccttgctcaatggttctagcaccagcttcgtcccagttatattcttcatcatacttcaatgcgcgtttaatttcggctttatgaaatagacgtgggatcggcatagcataacgggtccaacgtagagttttccagaatccatcgcgctttgatttagcaatcagtttcttggcctctagcggtctttcccgattttcagaaatacgcagttcaacatatttctgttgggtttctttatctttctgagttttaacgtattcgttatagcttttaatataagcaaattcgttattattctgatcgttccatttggaagattttactacatgccagcctttacggcgaattgttctagacattattacctcgttaagttaaagtacctcaacgatagtaaaatcctgatttaaaaaatttaatattcatgaatagatgaccttacatttacattttggacattcaggttctttggttttaagacgcttggtagcagtctttggagcagtgttgtaatcatatacatgaagacaacgatagcacatcacatattttttcatattaaaccaataacgaaagcaatattacgtatagtaaaaacccaatcacgagtactagtactataccacccgctatagcaaataggctactcatgtttaatataacacccattcatattagcaataaagtctttaccctgtgccaatactttacattcggaattaagacgattttgcatttcttctcgtctatcactttgtatagatgctgccacaccaatccaaatgaataacatacttaaaactagcatcaggagagtattatacgttcttggcttcattataaacacctaccagttcgcaccagtgtttacgacaaagagaaacgtatttgtcttcaccaccaagttctactacttcaccgtcggtaatagcatttccgttttcatcaatacgagctaccatagtagctttacgcccacaatggcaaacccccttaagctcgaccagtttatcggctacagaaagaagagctttagaaccttcgaataactcgccgcgaaaatcagtgcgaagcccatatgccattactggaacatcatacaagtcaacgattttacatagctgaagaacatgttcagcagtcaagaattgtgcttcatctacaaatacacaatgaatatcacgttgtgtttgtgcccacttgaaaaattcaagtatgtcaatagattcgtctactgtattagcttcatgacgaagaccaatacgagaagtaacttccgttgccgaatcccgagtatcaatagcaggtttcagaatgagagttcccattcctcgttctttatagttatgggctgctgtaagaaggttagctgatttgcctgcattcatactcgcgtagttgaaataaagctgtgccattaaagtgtctccataaaatcagaaatagcattcttagaacgaatgagttcatcgtattcttcaggtagaccatttccgtaaatggcactaatagctactacttgctcggcacctgcataatcgtcaatcaactgccacagtttagttttttgctcttcagtaatcatctatttacctctaacaagacggatttagcttttagcttcttcatattctaccaccataatgtcaatatcaggggttgctaaattaataagtttctcaattagttcccaatcaccgccagcaataccagcaccaatctttggaatgtatagaggacgattataaacaatacgaccagaatttagttcatggaatgcattaaaaattgcgccgtaatcaacatttggacctggagcatactgggtgtatagattatagcaatatgcagtgccattcttatgggtagctcgtgtatgagttccaagcttagctaaattgttgtcataataacggtcttcatcgatgtcaatatcgagaattggaggatatgctttagcaagttgtcctgctacaccagcacccattgtagtaaagcaattacatccatgagcaatatcgcattcatgcttcatgaatagttctacaatattacccttgatatatccagtaatcatttattcacctacggaattttataagttgcatattcattaagattattgtatactcttaaaaatatagcattgttgcaattaaggatagggttcagcactccttgttctttaggatgcattactccgtcaatagaaacgccatcgctctgcattccacatccacgagcgttatattcgacaagtggaactattacctggtcatctttatcttgataattataaaatgacattagcaattttctactgctaggaacaaatgctatttcaatgttgttcttgaatgggccattactttctattttagtcccctgtgctgcaagcacagtttcaggatagcctgggagcttttcccaggcattaactgaaaatgcgcagcataataaaatagctgcttttttcattttgacgatagtcctgacatataacgagccattaattggtcacgatacattaaacatatattttcgttaggagcattgacacataaatctttcatgctcttagccttacgatttattagtgttgtccactgggccgggctacgtgaatcttttactccatcgctgaatgctgaatctaattcaagcgctaatatatcaacacattcagagttcgtattgcaaaatgttttagcgatacgaagtgaatctgtcattgaattttcagcattagcagagaatgccaataccaatccaagaagcgcggcgtactttaccattattccacctttgtatgtagcattttatgtttctttaagaaattagctttctctaggacatctgacgcataagagtttcctcttttgacattccatcctgcgttataactagcaagagcttttcgcatattgccgttatgtatatttaaccaatatgaaagctcaatatatgcccattccgcggaattctgtctagatttaagcatttttcttatttcagaatcactaaggttttttccttctaatttagctctggctttaaccgtaggcaagtaattttgaaataccccataagaatgatgcccctttcctgcttttaaattggctcctgccgaagattctttccatgatatagcagccattatatatcctaagccgttattatcatatcggttatgtggagatttttcctttcctgatttttgatattgttcaccaaaattatatgcgtaatgcaagttgtcaagttgaacattactgaaagttggctcagacccaaaggccgttgaacataaggccattagaccgataagcgcttttttcatgtttacctcaattaatgtgtataacttttgtgctgattttacctttcaaacgtttatcattaacgaatgccatacgacactttatactaggtccttttcctggtcttggaatatccatggtaaatcctagccacagatttccatccgtaatttctaaccgcattggcttatactcgatgttttcatcaatgtcttttgggtcaattggaagccaaggcattgctaagaattcattaatttctttaagatgattaggaattttggaaagaacagagaatacatactcttcatcaatttcacgttggatagcacggtccaataaatgatcagagtacttagtgaagaaaggctctttgccctcagccttagctcgggcacgaactgataaattcaaagagcgaaaagcttcctcaaacttacgacgcagtttagttctgcgaatgaatacttctgggttagttgacatagttcattctcctttgtttgtagggccatagtatcatggcccgtaaggaaagtaaactactttttaatatttttcttctggctgaaacactgaacgacacgcccacattgaggcttccttcaggtgctgaatagcattgcgaatttgagtaatgcgttcattagccaagtcaaattctttgtcgctcattgtgctaacatctaagctcatgtacttttcgacatgatcttcttctaatgctttaaaaattaatccaagacgaatttccgcgtctttgatagcattcactttaccaatcttttcatcggtatgtggcttatatcctttgatatcttcaattgacattatagtgcctctgtaaaggtacgagcgataacatcgcgctgctgttccggagtcagggagttgaagcgtaccgcatagccggaaacacgaatggtcagctgcgggtatttttccgggtgctcaaccgcgtccagcagagtttcgcgacgcagcacgttcacgttcagatgctgaccgccttcaatttttactgttggttggtattcaatttctacttcacgcgccttgtagccataaaaagtttcagcatccgtaatagtatcttctttaagaacttttgaaacgattactcgtgcgtcatcaccatcttcgatgtaaatggtgcctttaagttcaccttcaagaatttgatatgctttcatatttcctcttaattagattctttattccaaccgcgcatgtatgcggtaattacgtccatagtattccactcagtagaatggaacttggatgcagcctgtaagtacgagattttaccttctggcattaattttacccgtgctaaacgttcagaaatagcagcgtctttccatgtagcaaaacccgttggtccttttaattcttctttaagacgaataacttctgcttctaattcagattctcgccataagcgttctctggcatcattagcataaagtatttcttcatcagtttctttatcgtattccacaatttcaataggctcgttaactccatatccgcgagtgcctatatacgttgtagcttcttcccactgttttgtggtttcattccaagttccattctgatgggcttcatagaaatcttgctctccagaattactgaaccaatcgcagaagctttcaactaaatgtggaggacactttataacaatttcagccattgcattgttttctcttgaatgcgttggtcatatgtgattaagcttgaactaatcacgcctttgagcttgccagatataaactcaattctaaaattaggatagcgattcatccacttcgtgttaggagcgttagaaatgaattctgcacctttaaacggaccagacagaaacttgtagcgcttgtactcaagcaggttgccagccgtaaccattgttattaattgcttcatatcggcaaatcctgtattttccattactgtaatcatatcaacaatttctgtctgtgtcatcattgcattcctatcacgaaaaataaaggtaaggtatcattaggcatagaccatctgatagcttcctggtacatgtcatagaacttcatcatatcgggaactttcattggttcttcaatgataattaatgctcttccaagctttcttcctctaaacttataagaggaatcattggatagaaattccctgattgtcatcggaacaattgatttagctatctcattagccggtaatttattaattaaatgcgatgaattatattcccgtagaataccttccatcagttcagatgattgtgtgtatcgagtagataagattataaccgaaccatcttcaagcaaccaatcggtagcgaattggcataaggctgttgtctttccggtttgtcttccaccatctagacgaagggtaccgtactctcgcataaggcaagacggttcataaaaactgtagttgggattattcaatcgtctgtctgcagcgtctctgaaagcatgcatcagggtcaaataaatgggagttaagtgtttcattttagattccagttaaaggggccattccttggcacatgtttaatccatcgacacactatgtaaaccccttaccgcacttgggctcgaccttattacaggtaggaaaagctacttcactcagaggaatcgacgttcatgaggagaggtcgtgttcagctttattaggaattagtttgaattaacgggctgcattagcaacggcgtaagcgtactgaacattagcgtctttaaacgtacctttagaggtatctaaatctgccttaaatccgcctttagtcataatctcggcgaattctttacggaaggccatggcgtcaagatttttccaggctgccttatgcttggcaaattcacgaccagcgaagttgacagccttagccaatttattatcaataacccatttaccagctttaggcacaaacaccgggcctttctgcttagagaatagttttaaattccagcggcgaaggtctccatcagctttaacaaaatctgcgtccaagttactagcaacaacatcttgaatatggccaaatttaagtccatcagcttcaatatttaggtcgttacgccagcgaagtccttcccaggcgaagcttttaaagtcagaagcctttgtagctaaataccgctcaataggagctgttttagggtcaaagccgtttcctcggtaggtccactcatctttattaatgccttggacctttcctacagaagcttcggtgataaattctttataggttttcattttatatcctttaagttaatacgtgtcatagtagcctccatttaataaggctactataccacattaacgtctcaatgtaaactacttaattgatttagcgtaacgaatagcgccacgatcgtttacgaacgcaatcttaccattacgcatgtacatggtaacagtacgctgataaccgttagaagttttaccagactgataacctactaatgcaaagttatcttcacccggtttgttctgcttagacttaatacgctcatgaccaagtgccattaaggagcgtgcatcgccagatgctactgctttgcgagaagactcatcttcaatagaagaggtgaaatcatcaaatgaatcaaacttggcatggttcttattgtataacttgccgtctactacgtagttatatccaacaacgtccatttcaatttctgtaccatcttctaacgtggcggtcatcttctgaccttttttaaatttcagaagattacttccaacagattcagtcattacgccaactgttgctaaacgggattcatttaaaaattcttgataagttttcatttattttccttgataagcggcccaagttccggtccgcattgtttcaattacacgacgagcacgattaggtgtctgacgataccaacgtgaatttgcaagttccttggcagcagcttcccactttttagcgagtaataacttcattgaagctgggaacccggctacaccagacacacccatttggaataccatgttaatcagagcagctctacgaacatcatctaatacattatataccgggtttaatgtagcattagcaacaatacctttaattgccttctcaacatctttggcaaaaattacttctgcctcagcctgagtaatttgaccaccagtagaacgacctaccagcttgtccaggttagaaatagccaaagattttgacgggtctttagtcagtaagtggccaataccaatggtccaatacccttcggtatctttataaattttgctatcgtatccttcatcaatacgcagcatgccaaaaatatccataaggacctcctattaaattataggagtatttatttggccctgcacttggctatgaataactcaaggctacacttctcgtatggcgtccatttacctttccaccacacataatctcttctatcgtcctcgggcaattcactaaatcccggatatagctgttctgctatataatatgctgattttgtatactcgccgtcaccgaagacatatcgtgatttcaatagtatacgcgacattttatctctaggatgaaatatgctaacccattttccatcgtgaataaatcgtagctcatgcttataaatgtgtggaatgcctaattcaacggcttcttccatagtaacctcactgggctgtgctatacatctgtgtcatgattttatacaaacttggtcccatcacatatttccattgagaaggtttaattaaagcaaatgcgtcgatttccgggaaagaaattccattttcatctttatggtaagctgtgcaacagcaattcttaaacacttctgggttcacagggagcatatatccaaacaaatggatatccttattgctgtcataatcatgtcgtccgaggtcatataagaggtcctggtcaaacccagtaaaccctgtttcttcctggcattcgcgaatagcagcttcttttggtgtttcaccaggctcaacatgtcctttcggaatatcccatctagagcctctgccctggacatatgtatttgtcatacgacccatgaaaagccgtttgtcatcggtaaagaataagattcctgcactgagctctttcattggcattcattccaactttcttcgagaatatcttccatggcagtatagaccatagactctagtacaccatcacagttatatgaaccttctaccgagaaatcacagataggtccattaataccaagcagttcttctttgagtgaaatctcgataccgctcagtgattcattatcactataacacagaaggcgagtatcaccattttcaaattttacatgcactgcaacagccattatttcatctccttaatccaggataaagtttcattacgagaatcatctttagatttttctttctttactttgggcttatcaaatacaccccgctgccgctgggaaacgaattgcaaccaacgagcaagcattgcaaaccaagttccaacccctgacatccaacctagatagtacagcgtatcaccaaatactggtgaaaagaagtagaatccccagaatatcccaacaccaacaaatgttgagaaggaaaacaggataagcagaaataggaagaaatacaagaaatcatcatctttaatcattccacggtaacaagtcttaatcatttgcgacagctcctaatccaggtgttgaaatcttctttttctttccacttcttgtatttcatgcggtaagccaaaaatgtgcagcaattaatcagagcgataatcagcatccatgcaaagctaaatacgaatacgcctaaaaataaaagcataatcataaactctgagacgttcaatccaaagaatgtccctccaacaattacaaaagcacaatataaaatccatgtcacgattccaaaagctggcgctagcccatcttggttccaaaacccgtcaggtttacattcattcattttcttctcacctctttaataaactcaaacgactttttgcggttccattcaagagttaaattcttgcactgttctttccattcagcctttcgttcacagttatgcttaacatactttacccaacgaaatagctcaattaatcctagaccaagtaaacctattaatccccatgtaagtaatattacattcactaatgatgtactgctaatttcagccaaattcattgcgtcgattatgataagcgttatcatagttccagcagcacagaccatccccggaattagaacataatcagtttggtcaaatttatagacataattataaacgggaggttcacttggcagatataaattactcatttctgcaccctctcacggcagtatttgataaattcatcaatgattaattgtttgcctaccatgttgttagagtcaaacatacccatgacttttggcggtaattcattaacgcagtaatttaaataattgctataatcatcctgagatgtcacgtatttaaccagattaataccgagacgataactagttttattatagataatctcgataactactgtatatgttgtggagctagaagtaaaatatccatcggcattagtacgagctgatgttagatttgatggagaatcgttgaaagaataaattccgtaccgaagtgcaaagatatctacaagcttaactccatcggaaatagacgaaataccggaaattaagtttttcaacttgtaatagtctttaagaacaatagcccgcggcaaaactgtggtgttatacccgttatagcgagttttccaattttcaggccgagtatcaggataagcaaattttccaagaatatcagtgatttctgttgggaatcctgctgcaattaattctttaatttgaggtgttgccattggaatatctccagcgcattcatataacattttattatccaagttaggggcccgaaggccccggtaaaattacttcagactttccagatattcctggacatcagcagtggtggtttcaataccaggctgagtaccgctgaaggtttcaactttcatcatgatgtcttgtacatctactttagcgagttctgcaatttcaatcacgtcatcagcagaggtaatacccagagcagaagcattacgggtctcacggatgtattcgagtttcactgccaaatcaagacgctggtcatcaagcttaactacagtttcttcaatttgggcccgcatttctttatattcggcagctttatcacgtaaagccttagcagtacgacgatacagaagacccagtttagcatgggtttctacattcataccttctgccatcaagcgacgaatttcgcgctctttggaagcacctgcctggtctttttcgtcagcaagtttcagcagacgcttttcttcatttactgatttaacatgcgtggtacgcagtttagtgatttcatcaataatacgatttgctgcagtggtgtactggtcttcaacagaagtgttctgtgcaacaaaggtaccgaatttagaacggatgaattcaacaagttttttcagaatagacattttatttcctttcaatagttatggtggttttattcgtacggattaatccaatcataaacatatggtttaatgattagaccctgttcatttttgctgcgctcgaatatctcgatgtaatcagtaacgtatgattctaatccgagaataagtacagactctttgccttcttctacagttgctttaattaaacgctcgatggctattttagcttcaagacgaatatcagcaagggtttttggaacttcatttgtatgcattaatgagttcctccattttgtccaaaactgcgatatcaacaagacgattaaccgccgggtcatcggcaaactcattgtaagttgaaatcaccaggttctcgatggttttcaatgcagccattcgttcttctccagacggaaagtttggtgtttcaccaaacagcctagcaaaagatttaaaataagtttgcgctattaatttcaacttatcttgatacataccaatttcctcagtaggtggggagttcattataactccccaaaattattagcagttaattaccgcttcaattcgtttaaccaaagcaggaacagttttagcaaacttgatagccatttgaaccgtagcagcttcttcatggtaaactcgaacgtagtactcttcaacagcaggccaatctttgcgaacatgtttaatcaagtctttcagttcacgagtttctgctacgttgaacactgcattctcatgttcacctttaatccaaatcgcgcgataacgatcaggagtaccgtaatgattgtatccacgttcaatttggataaagttgaatttagacattttattctccgttactctgttttgttttgatggagctatagtaaccgagttgactactgatgtaaacaactttgtgaataaattttcaaataattttagggaatctggagggactttctagatagtagaatggatttatacagctgggatatagaaatgaccagacgacctctagaaggtatctgggctataaatgtggtattatcgtatactaaaaagccccgtccgaagacagggctctaagaatcgacagcatcacctactggcagatgacctgcgaaattcatttctttggactcggaggcatcagtctcatccaaagaagtatagcgtcgtggaggtgtcaccttgcagggtgattaacaaccggaggactcctcagaaccttgccgataagggctaaccttctcttctaacacgacgtcttaataggagagctgcaactcttcctaaaacttacattacatcatattcttcaactagatattcggaataagagttatttgcttttagttcttctttatactcttcagcttcaagcttggtatggaaaattcttttgggtagagaatactcatcatatccatattcaacgttccaactaatttctactacaacatatactttcatattttcctcataaaatttttggatttttggtatgggtaggaatcgaacctacaaaccattcagcaccagggcctcacgctctacctatttgagctatcacataccagaatttggtgccgattgcaggagtcgaacccgcgacatcttcattacaagtgaagcgctctaccagctgagctaaatcggcttggtgcaccgagagggattcgaaccctcaatccttgcggcgggagattttaagtctcctgtgtataccagttccaccatcgatgcgaaatggtcgaggcagaaggattcgaaccttcgacctgcggattagaagtccgctgctctatccaactgagctatgccccgagattgttcaggcaggacttgaacctgcacgactgattccgtcagcgatttaccaccgtcgccagcatatgatgcaatatgcgagctcaaaaggtgtccgtcaccatgtctaccgatttcaccactgaacaagataattatattactgattatttatagcatttctcaaacgatagagttgattacaaaattcgcgttcagtcaaaatcgtttcagaaattttgtttttgcccatactgtgagtgagcgtagcattccgggtagcagccaaagcttttctgaatccttcatttttactaagtgcatcgtatgctcctgttagtaaattctgatacgcttctgaggcacggtgaataggaacacctttccaataaagtgtttgagttggccaccaacgtttcttcttacctttgaacttagcggattttccgactagcgtacatacatgtgcttgcatttcaggcgaagaaaatttgagggactgcaagaatccctccattgaggcacattctacgccatcatagataaatttatgaggagcaaagttgctcaaagcacatgatggatatgaactacctgaaccaatatccattacttttccttcacgtatttcaaccaatcaacttttaatgggctttctttctgcttatacgtaattccaacatggaatgcaactggagcatcaggaatacgaatttcttcttcaatgttgaagatttctactttctcaaatacccgcatgaaatcatagtcatattcaattggattacctagccaagcctgaatagcatacataacttcatttgaacaagaataatgattatctaaataagcatcaaactcttcgtctgagcaatcatatgcaggaacatcaacaccaaagaatttcttggaaaattcaggagttacatacttctgttcagtatgaagcttttcaagaattgcttcatggttgtaatcattatttccaaggtattcaccacgccgaccattagaagagaaccattcaagaacgtgaattacttgattaatctcttctttttctaagccataaaccatttgggtagaatatcggtcggcatcattttcccaagtggtaattgccattgctaagcctttaggaataacttgtccaaatttaatatgcatttcaatttcctcagttgataatttggtgaccctggcaaagactcgaacatgcaaccaatcccttatgaggggaacgctctaccaattgagctacagggcctttatagaaatcttatgacttttataaaagccctccgaagagggcgccttgtcgggcttatccacctgctaggcagaattactcacacataaaatcagctacttcccagaagtcatttttaactgctactttaaccaccggagaaatttcagatgttttaatagaaacaattacatcacctgcgacagtttctaccagaccaacgattttctcgctgcgagcaacaaatttactcaccggatgaaatttaccggtagcagcgaacatagcttcttggtcaacaatcagtgcgatacgtttcattctttttccttgtttgttttgatgtagtaataataacaggttattcttgtagcattaaatctcgaaaatcgttccgttttcccacattgttgcgaacataggagaaaccttaacgaatgatttgcttcgcattgcaacgtagtcgttatctactttagccaatcctgaagcaatatcagtaatacggccacacttcatagaaccgcgaccacctttattgtatgtgcgttctccgtagaaaacgatatcaccaacttgtacgtctcgacctttagaatctttcatcatatttcgcctgataaattcgtttaaaatcagtaattagctcttctacatttgaagcattagtaaacggaataacttgacgcagtttacttactttacagccagaatgataagcaataacttcttgaatatcacgctcactgaagtactcatatttgattaatgcttcgtatctgcatttaatccagacccacatacctttgcgttcatcaaaagtatatgcaaaatcagcatgaagcattaaatcacgttcagatttacataatcctaaagcaaaattagttggacgattccattgtaatttcaccgtaatagcatttactttatttgcaacaccaataaaaatattcattctatttccttcgcttgtttttggccttcttgtcgtgcacgagaacgtcctgctttatgcagtgattcgtaatatgctcgacgtctatcaatgttttctgtacgatatgctttcccgaaatgggatgttttgaagccgtaatatttcataatataattctcaatggcaagtgattggacggtatgcccggcctcgaaccgagtcacattgactttgcagaatccatgtgtttaatatatcacccatactcaatagcatatctgaacgagactgcaatcccgctactcagcttacaccatcttgtattgtgtcataccgttaatttggtctccatagaatgactcgaacattcgacctctccatcccaaatggagcgctctaccagactgagctatacggagtaatttggagcatccagggagaatcgaactcccatcttctgggtggaagccagacataatatccgctatacgatggatgcaaatttggcaggccctgaaggaatcgaaccctcatcactgggtttggagcccagcataatagccgttatactaagaacctgttatttggtgggagtaactggactcgaaccagtcaccgctcgattatcggtcgagagctctaccaaatgagctatactcccatggaaagctaatcatctaattgttgatgtaccactgctatgggcagcgtttaactttcataaatttggcggagagtaaaggagttgaaccctcaccgtttccgatggcccggatttcaagtccggtttgctaccactagcgctactctccattaattggtgaaggaagtgccatatagacacaattcgcttagcgacaacccagcatgactgtgggtcgtgtatttttccaccattccttcattgttggggtgaccgatgggagttgaacccatgactacgagaatcacaatctcgagttctaccaactgaactacggccacatcaatattcactccatccatcatgaggacttcatacgaaattaagagaagagtgatcagttcaacccctgtagacgcgttgaatgaatattaatttggctggactatctggattcgaaccagagataccggagtcaaaggccggtgacttaaccgcttgtctatagtccaattatttggaggcggaggcaggactcgaacctgcgcgtgtcgggatatgagcccaacattctaccaactgaagttaccccgcatttatccgggttcttgaagtactaacaagtagcttgatgtagaacacgctaaagatataatcttacgaatatagagcttattccgtgggaacaaaccgcttcgtcctcggcattatcttacaggactcaaactcatcttcaagaactgccacgttcttatttggcggacctagcgaggatcgaactcgcgctctctcccgtgacaggggagtattttatccaactaaactataggtccataattcgctttcagagatactctggcacgatgccgaagcaaaggggaacaggactctcatcaccttggtaccagatgaatcttgtttagcactctgttctaagatgtatccctgaaagcgaactttcaacgccgtaagaaattataagcacgtagttatcgttgagggaactcgtacacagggaattctatgccgacgatttatcagaacgtcttctgacttcttcatttggcgggccgtgcaggtatcgaacctgcctagtcatttctgacacggattaacagtccgtcgcttaccctctcagccaacgacccgaatttggtgggacaccgaagactcgaacttcggacacccggattaaaagtccggtgctctaaccaactgagctagtatccctaaatttggtggggagtaatggagtcgaaccactcgagccttttgagcaacagatttacagtctgtcccgctacccctacggtctaactccccaatgggtaattttatttatactgctctaaaattaatcagagcagttgatagattaataataacaaagaaaacctaaagcatattacacaatcggtgagctctttgatttaaccaggaataccctatgcggtgaatccatatgagagagcaataccctgtgctcaggaattggacttgtatggaaaggaaccacacgataacctttaggagtaaatcctagcaaaataccaacgcttgctgcagaaagtgacccaccacagtagtatgataccaaatcaccaggctggatttcattgtcaagagaatcggttttgacatgcttaggcgtaactaaatcactaggaattggaacgccttgtgcatcatagtattcatgggcaagaagcttataattctcttgatagaaagtattaaatgcagctctgatattcatcacaatttcctcacaattaatctttgtgtgcttcagttgaacctttagcaacggtttcaaatcgggaattcagtatctcaaaatagtcctgatacgttccctggagggcttcataacattcttctaccgtagaatagacacctctgatttggtcagagccaggagcaggataataattagaccaagttaaaagtgcatacattacttacgtttccagctgtagtgagccaaaataagaagcactgcaatagcaagtagtgatgaatgcaatgctgctagtagtgcacctaatcctacacccaaagtaacataatcatacttagttacttcttcacggtttaaatcatagtttttgatgaaccactgcttaatctttttcatgtgctattttatccattatgaaagaaatgatacccattagaaatgcaacacttaacactgatactgtttcaggaagagacataaaggctgcacctataatgccaaaacctaacgctcccatgcagatagttgatgcaacatttctaattaattcacaacgtttcattttattctcctcaagttgatagggttatagtatcactactacaacccgttgtaaacaactttattcagcgccagcggcttttaaaagctttttaagattagcagaacctcgggcagaaaaagttaccttaccatctttttcaccgatgctgccagtcaatttagaaagtttatcactaggaacttttttaaaatcggctaatgtcccgtcaacggtttttgtaacaatcggcagttcatcatcctgtcttttagcttctgtaataaattcttggtacgttttcatgttgcttccgtttggttagtttgttttgatggagctatagtatcaccactagaaccggttgtaaacaattttgtgaaataaattcctatttcaaatcttctgaccagttcagttttagtggctcttggtactctctatcaagcactacaggtacttgaacttcaccctcgaagtgagctggaccgacattgtagctgagagtaatgtgcggtgagtaatctgggaaatcatgagttgctcccagagctcttgcatattggtgacggaattttaagtattctgaatctagtttaagaactagtgtacgtccgtcttgcgtgtcccatacttcaagtttacctgatgtagcaacttcaaaacttcctgaagcgcaaacgtatggaacatgaactcttgaatagcatatcgtcgtatgaatcttatgacgaggtacaggattagggaccttcaactcacgctgaaggtcctcaatagcatcaagagttttctcagagaatttagcagctacatatagaccagtgctaaaatcactgaagttcattaggcatcagcttcttcagtagtttcttctgagaactgtgcttcgatttttgcaacgaggtcatcaagtttaacctgaccgtcttcgctgatttcaacgccagatacggcaatcagcttctgcagtacttcttcatactgtgcacgcagagcagacagaccttggatggtttcagacaggtcaaatacacgaactttcagagtatcgacttgggcttgcagttgttcagtagtcatttttgaattcctaatatagtgttgatttttgaataaagttcttctagagaaccgtcgttagttattacgatatcgccttcgcgaatcggaagtccacgctctgtgacgtgagtatcttttttagaaccttcttgctcaggacgaactacatgaataactgtagcacccatcgccctggctacatcaagttcatggtcttggcgggtatctgggacaatgaaataatcataatcaccaaaagtatcagccataaccaaagtaaatcgttttacccaatacatgcgatcgagcttatcacagacaatgtcagtcccaagggtctgcatgagacgacgaattgaccatggctcaacaggtttatttattacaacttgacggatgacttccatcgtatcgccgtcaagaattttacgcttgctatcataaaccaccccaggtaaaggcaaatcatgatggacatattcaatggcattcgccataatacgaatcacgtctttagtagacagatttaaatcctgctcacgatcgtaatcaataccttcaatcattgaccgagtaatgcgaggaaactgacgtgatgtatcgcgataccactcagtaagcattgcatcagccaacgcatctttaattggacctgctaactgatgctttgttgcgttatagttatccataatgtagtcagcagttgtatctttgccactacgttttttaccaatcaaaaataaaagcttcaaattattacctcatagaaggatgcattcccataactttctgttgatactgagattcacgagtatcattgacagaaggtctaccagtaattattataccatctttttcaacttcaatgtatttgtactgcaaagttgctacacataccattgctgggtcggattcttcggttaaagaatactcaatttcagataaatcactcacccaacctccgatgtagcggacagttaatactatatcatgtttatcgttatcaagaacatgcattaaaactgcaccaggaaatccttcaccgccgttattccatccagacttgtctcggtcaatgtagttttgacagcttaacatccatttatacatttgtacccatgaatcaagattttcatctactaaaaatctaacaggaacagcgtcaaactcaaaagtagacccaggcaatttagcacgatgcatgccttgaggcgaacctacaatatcagtagcaggaatatgaattccaggaactacagctgtttgaagattagctttaaacgcttgggtgaggcccccatcagggacctctaatataaagttagttgtgttagtttgattaaacagtccagtagacattatgatttccatacagaagtagcagagtagcgtttgcctttcgacatgaactgctgcagtggtaacatgactacattcgcccaatcagccggttttatctcaattaaagcaccctttatattaccaggaatatatgctttaatcattttgtcagcgccagcaaatcctttaacttggctccagtttatctttaatctggtcttattagatatcactggcgtattagcatactgtttaagaagttcttctaaaaactgctgacgagcctttggcggaatgtagtgaaggtttaacccatacatcaatgtggttgtaccttgctttccaagaccaagataaactatcaaaggaaatttatcccagaatggaagagtgtctttgtgcttagcgtcatacatgtaagcatatagctttccaggttgaggcttggttacagaatgaccacgtatatttttctttatagtttctgcaaaccatttagcagatttattgtttactgctgctccttcattacgaattttatctttgatagaactacgaaatgaatttaccatcacaagagcgcgctcttgcttggtcattttattagcaggttttttctcaatttctgctactttaattgctgttttaattcttgacgcatggcgagccatagctttactgaacgtagcaggatttattcctttgctttcagcaaatgattttgacgtcatgccttttttacgagcagcagagtattcaactcctaatgctacccattgattttcactacgggatttagctttaggcgattctgcagcttcagtgataaattcaaatatagccatcagcctttccatcctaattttttaagtgaatcttcggtaattaacctaaattctatacccattttactggcagtagcttgagctgctttccacttatcaacgtttacagaccaagtgtaaatttcatcaatgtaccgtttcttcgctgatgtcgtcaactttgtgggtttgaccggaggtctagtttctttcttcggcttaacttcaaaaaagaactgttgaccattagaaaacttagcccagaaatccatgaaataccggcgtttctttccatctgcattactaaagtatggaatgactacttcttcgctattccattggactacatctggatgattgtcaagccaacgcatcatgtactgttcccatgtagaacgataagtaatctttctaaagtcgcctttatatttgtggagattctgcggcatgaatttgccggaatatgccataatggcctccttataaatactgttattaatatttataagaggataaactatgctcttctcattttttagtccgatagattattctgcaaagaccgtaaaaggtgctaaggcaaaagctatcccaaccgctgacatatttcgtaattatcgcaaatatttcgacactgtagcagaaaactatcttttacaaacatattacataagtggagctcctagaccagaagaattagcatatattctttatggaaatagtcagctgtactggattcttttaatgtgtaataatgtatatgacccgtttagagattggattaaaacccaggatgcatgctatcaatttgcacaacaaaaatatgcagatgtaggtggagaccaaatactctatcacgtggatgcaaacggcaatcgttattataacctcgagcaatatcctgaaaattcaggcatttggtatgataaaggggactttaatcaccagtaccctcaatatactggggctttagctggtgttgacatttatgaagactctattatagaaaatgaaaaactgcgccaaataaacattatcaatcctagcgatattgaggcatttctttctgatattatacgagaaatggaaaaggctcctgacagcgaatatgaatcaggtcgatataaatcccagactaccatcggagaagttttatgattgaaatgaatgattcattaaaatggtttactggtgttgttgaagacagacaagacccattaaagcaaggaagagtgcgagtacgtgtttatgggcttcatccgtttgaaaaggtacaaggagctataaccggtcttcctaccgaagaccttccttggatgtcagtgattcagcctacaaactcagctggaatttctggagttggctcatctataaccggaatggtggaaggaacatctgtatttggcttatggcttgatgaattcaaaacagcaggattggtaataggaacatattctgctcatagaaaaacaaagccaaactacacggaaggcttttctgaccctacaggtcaatatcctagacaggtcgggtcagataccaacccactagttcaaggcgatgaaactgggtatagtgctataccaaacatcatccaagatagaaacctggatattggcattaatcctgacgatgctgacctaagcgatattcctgaagacccaaatcctgcaattacaataacagatatgcttaatagggatgaaggtcttagattgaaggtctactgggacacagaaggatatcctaccataggtattgggcatcttatcatggcacaaaaagtacgtgatatgtctgtcattaataaaaccttatctaatcaggttggtcgtaccgttacaggaaatcctggtatcattacaatggacgaagcagttgcgctatttaagcaagatcgtgataaaatgctttctgacattaaaacaaattcacgtgtaggaccggtatacgctaaagtcaacaaatcaaggcaaatggctttagaaaatatgagttttcaaatgggcgtaggtggattagcaaaatttggtaaaatgcttgatgccatgctcattggtgattggaaaaccgcttatacagaagcaagaaactctgtttggtttaatcagacaaaaggtcgtgcttctcgtgtttccatgattattctaacgggtaatatggaatcatatggagttcctgctccaaagccagaaggaaaaaacctgtctgctgcttacgtagaaccaaagtctggaggtaatcctgaagacccatggactccggaagattcaagaattcttttcaaagaacctgagtcttcatataatggtcagtatccatatgttcacacaatggaaacagaatcaggtcatatccaagagtttgatgatacacctggctatgaacgctatcgtattgttcacccaacaggttcatacgaagaagtagctcccgatggacgccgtaccagaaaaactgtagctgatttatatgacatgactcagggcgatggaaatattttaatctctggggataagaaggttaacgttggagggaacgagacctattataacatgtataatcgtcgacagcaaattgatggcgataacacgctttatgtacgtggaaatgaaaccaaaactattgaaggcgatggtactatttttgtcaagggtaacattaagatagtcgttgaaggaaatgctgatatccaagtcaacggtgatgccactactaaagtagatggcaaccacgacgtaaccgtcggtggtaacttaacttggcaagtagcaggtactgtgaattggaatgttggtggggcttggactgagacaatggcttctatgagctcaatcgcccaaggtcaatacactgttgatggttcacgaattgatgtaggttaatcatggctgatatacttcctattaataccacgttacgcgaagtaatagaaggtgaatacgttgagcagtactttactgctcaattatctaccaacgaaacattaaaatcaataaatattatcgactatcaaccagtatctgatatctctgtgtctgaaacctattataaaggtaattataactcagtttttacttttggaaacgatgtgcttaaataccgtgaaggcgatgagctaaagtccgcttcagcgtgggaggatttacctaatcccaaaactgctgatttatatctgtggaaagcccccagaacactagagaagacatttacctatacagttgagataatatatacagtgacagaagaatcgtctggaggttcatccggaggttctagtgctccaatcgtaacagaatataaaaagcaaaaggtttactctcaaaccgttaaaggcaactggagtagatggggcgaccaacttcgtgcttatgtatatgcggggaactaaatggctggactatcatttaataaatgcttaactgccgggcatagtgcgtatcctccgacagaagtaaatgctacacaaagcaaagtattcactggtggaatagcggtattagttgatggtgactcaattacaccgcacaccaagacggttgaccctcatgatacgcatggaggagttgttcaacctcgcacatccaaggtatttgtaacaggcaaaaaagctgttcaaatggccgatccaatttcttgcggcgacactgtcgcgcaatcaagctcaaaggtattcatacactaatggctattaaagaacctttaaattatcagttaacgcgtactgcaaacgctatcccagacgcatttactggagcaacattcgacgaaattaaaaatcagcttattaactggcttagtggtcaaaaagagttccaagattttgattttgcgggttcgcgcttaaatgtgctattagatttattagcatataacactctctatatacagcaattcggcaatactgctttatacgaaagctttattggaacagctaacttgagaagttctgttgttcaagcagcccaacagaacgggtatttgccaagttccaaatcagcggctactgcgtctattatgcttgaggtaactcatccaaatccagagccagcaataaaaatacctcgtggaactaagtttttggcatatgcgcgggattcatcagtagacccatacaacttcgttgttaccgaaaatgttattgctttaagagatacttcagcaccagaaggagttaataggtatcttcctattgtcaatttggcacaaggacgtattattcgtactcaattgtcatatgacccgaagaaacctattgttattcgtgatcagtcgattgaccgtaagcaggttaagctgtgggttgatggcgctgaatggactaactggacagacaggtcaatggttcatgcttcatccatttcaacaatttattatatgcgtgaaactgtcgacggaaataccgaattcttctttggtgaaggcgtggcagaagcctctgtagcaggaggagttcttgaaagtaatttcattggtggattaaaacctactaagggcgcgcaggtagttattgaatatattcgtactgatggtgaatctgcgaatggcgcaactgatttcagctatgctgatactctgcaatatattgtagtaaacaaaatcatcgaaaactggtcggattctcctgactacgttggagctgatggtggtggggaacctgaagacattgaacgtattcgcgaattagcacaaattaagcgtgaatctcaaatgcgctgcgtgtctaaaactgactatgagtcattcgttagctcgcgatttggttctattgtgcaggcagtacagtgctttaccgaccaagataagccagggtatgcgtttattgcaattaagccaaaatctggactgcagttaaccgctgttcaaagagaagacatccaagattatcttcgtccattctgtcttgctcccattaccccttcggtaatgagtccagactacttgttcatccgtcacaatattaaagcctcttacgcgctgaataagttacaagaatctgagcagtggttacagtcaaaaattatagactcaattaatagatattacgttgatgaagttgaaatgtttaacaaaaatttcagtaaatctaaattattgacctatattgatgatactgaccattcaatcatcggttcttctgttgatattcagatggttcgtgaaattgtcaactatttcactcttcctagcgcaggtattaaatactataatactattactccgcggacgttacgttctggtgatttggtctttactgtcactccaactgcagattcatatccagttaatatcgttggaactgacccagataaaaatggtaaaggaaatatggtcattggaccatttaaaccaggtgatattaaagagaatactcatattcagccatatactgaagacgattttgatagaactactaatggagaaagaactcgttggtacaaaatcggtgaagtagattattatggtgataatatttactggagccttggagctattggagccgatcctcttcagtttgaagaccaaagtattgagctttattctactcctacccaggatatcgtcttcgcccgcgatggaacacttatcgtatttgagaatgaccttcgtcctcaatacacaactattaaattggagcctattactcaatgacaattgcaccgttcgtcaccagcttacgaattcataagctatctgcgaatcaggtcaatattcgttgggatgacgttggtgcaaacttctactattttgtagaactggccgaaactcgaaacagagcgggggaaattatccccgctgataacttgagttggtcttcactgggttataccgcggataatgattggttcgaacaaaatcgtattgaaccgcttacttattataaaatgcgtgttcaaactacgtcagcaggatttgaaccgtctgaatgggttgaaacagaagagttccaaacttttgaagaaaacgcgtacacgtttgagcatatgcaagaattcagtttagtgaaagaattcattaaacagaagttttctttaaacaacatgtcgtatgttaacttcaacacatctgccatgatggcatctttgatgactgagtcttttcagtttagtcctgaatattctcatttatcagctattgaaaacttcgttgtaggtgaatctggatatcatgaaattcagggacctattgaagcagtgtgtgttgataaaaatagaactatgctgggagaaatagacggaattttgtatctgtttgaaagattccaacatatggttaaagtatcaaatgataaaggacagaattggcaatacgttcagttatttaatgaccgtgtcggaaatccggtttctagagtggtaatttatcaatctaaaactacttcttatgttttaggatatgataaaatcttttacggaaggaaatcatctgacgtacgttggtcatcgaatgaagttaagtttagcgataacgaagttacatttgctaaattgggagaccagttaaagcttggctttgaagtagagttattcggaacgtatgcatcattgcccgctgacgttaccaaatatgctgaagcgtttacatgtaatgatgactatttgtacgttgttgcaaaagacactgtccgtaaagttaaattaaaagatgctccaatagatactgaccctttaagtcctacatttggtgaaaaggtgtttgaaaaggaagtatctcatataacaggcaatcctaaatctgtatgctttaaaatggattccgttggaggcaaaatctttgcccttattaccggggaagttaaaaccttaggattagacccaacagacccaaggaacgttgtggattctgcaactaaaggcgtctatgtttaccaggaaggcacaaatacttggaagcgtgtatttggtaataccgatgaagaaaaacgtcgtatagagcatttatggacttctatgtcaactgacggaaaggaaatattcttttcatcagctaattttaagacaacagagtacgctcaggatattgagcttgagacgaaatatccagaactagtttctaccgcagttaaaaatgttaacccaattcagtatcactctgataagcattatcacatgatgagtttcagagcagatgaattttcaagatgggaaacatttgttcctggaccgatgaggttttatgctgaaccttggtttgtctggatggctcgtgaaggcaacagatgctggataagtacagctgaccatgcagttgtcatttataatgatattctttatcaaaaaagagtagatgcagcggcgcagggaactaccgagcgtattctatcggaagtgtgggataaaggtgacgcaacgttttattgccctccagtttcatttaatggatttttgcagtatgcttctggcatcatgtttcacgaaccagacggaaaactgataggctattacgcatttgactaccgtgttcgtgaccaggtaacgcttaactggaaaccaactgatgtaatgtttaaggcgtttctgcagaaccaaacacgggaagaagactggacacctgaacatactcaaggcttacgtgacccagatttgcgtccgtatcttactaaaatgatgccggatagttacttgctacaagatagtaattttgagcacttttgtaagtactatctccaattcctttcagatggaaatggaacgcattacaacagtctcgttaatcttgttaagaacaaatatcctcgcgaagaaaatgcatgggaatatctgtggtcagaagtttataaacgcaacatttatctgagtaaagacgctcgtgacgctgtcgtccgtttctttgaagcacgcaagaatgatttctatgctactaaaggaattgaagactcatataagttcctgtttaaacttctttataacgaagacgtcgaaatcgatattgagtcaaagaacactaccgaatatgacattattgttgaaagcacaaatatttctgacgatttagttggtcgtacgatttatactgcttccggtcgtagtaatgtgacttatatcgagagagaatatcgggatggtcgtctgttgtggcgtattactattcataacttatcaggacggttcattgaaggccaggaaattaaatcagagcgtacggactttgagggtattatagttcaaggtgttcgtggaaaggatatgctgagtaataacattgattatataaaccgcagccgttcttactatgttatgaaaattaagtctcagcttcctacttctcggttccgcgacgatgtattaaggtttgttcatccggtaggtttcggtttcattggtataacattgctgacaatgtttatcaatagtggcttaaatatgaagcatgttgagactatcataaataaacttaagaactataaatgggatgcaggactgccatcagtttatcctgatagagttgctattatcgcttcagatgatacaatagaaagagacccaataactaatgagcctaggtattcttcaaggactcaagctggtgaacctttcccgttacctgctaactataatcaagaaaataataacagcattattgctggacaaaacccaggacaacgacgtaagccgttgagccctacatttgaccaatcagcagtaacgtttgccaattatcgtgatttagttaaccaacgtcttaaagacgatgcaggtaatcctcgcgatcctgaaaatccgacacaggtgaaaattgatgagtaattcaacaagagcaagttcaacgcgtagcacgatttatcgtgctatcattacatctaagttcagaactgaaaagatgtacacattttataaatcaattggtccgggaacggaccaaaacacgttgtatgtttcatttggtaaaagcactccgtggtcagataacgaatctgaacctgggtttgcacctccatacccggccgataatgaagacggtgtggttgatgtttggacaaatatgatgggtgcagtcaaaattgaatcatctatgcttgactgtgttgttccaagaagagactggggtgatactagatatcctaacccgcgtacatttttgattggtgatattgttgttgctaactctgcgccatataacagaactgacgctggatttggatggatggtatatagatgtattgatgttccaaaagatgggatgtgttcaattggaaatcttacaagcaaagatgaatgtattaagcttggaggtaaatggacaccatcagctatttcaggttcagctcctcgcggtcgtggtgatgcaaatggtactgtcgatttaggtgatggatatctttgggaatatctatatgaaattccagctgatgtatcaatcaacagatgcacaaatgaatatattgtagttccttggccagaagagattcaagaatctccggctcgttggggatttcaaaacaacttaacatggcagcaaaatgactttaatttaatttatcgcatgaagtgcaatacaattagatttaaagcatatcttgacgcaatttatttcccagaatttagtcttccaggaaatactgggtttagacagctgtcaattataactaatccgcttgaagttaagccaatgccaaattcacctaatgttaaggctgaaaaaggctggtatagtgcttctggtcttgaaaggcagtcaggtgaaatgatttacatggaaaatcggcaacctattattcgttcaatggaccaaacggaagaattaaacttaattttcgagttttaattatggggagccttcggctccccatttttatataaataggactatactttgataagaggttactactatgtatgtagatgaaggtaaaaaggttattgacgtcggtgaagtaggtaacgcttctacgggcgacattttatatgctggcggcgtcaaaataaatcaaaactatgacgccatttataacgcatttggagaccagcggctatttgctgcagggtctggagaaggaagtcaaaaaattcatgcaacgagttattatcaaaaggtaaaatttggtgatgctaactcggcagggacggttccaatgggagcgtgcttagacgcagattgttcagaaggggcagttcagattcgtctttcaaaaggtaaagcgggagaagctgtattcatcgtaaatagtaatggatcagcatcaaaagctagacccataaaaataacaacaaacggcgaaggtgtagcagatgcatttaaagatggatcgcgagaattgattatcaacacgccaagatgtagaattgaattgtggtgtgttgaagtcaaagctaacggtgctgcagtttgggattattcaatttcaagtatgtttggcagcacatattcgccgttagaagctacatataatttaacgagttctcctattaatattcggcttggatataacgatgattactctactgttaaattgttattaagcttcagcgcaaatccaggtggtcaaaccatcaaaaggcaatcatctgaagtcatgcttatgattgacccgactattacttcatcagcgccaaacggaagagtatttgacactgaatatgcagtgttaagaagcggtgaatcatctgaaaatgaaaagatgtattctatttcatactctattaacgcgcagaaagatttaatatgcacagcttcaacatcttatggaaacgcccgtttggcagttaaagttattgctacacagaccgtaggggtatctcaataatgaaacaaaatttgatagtaggccaatcagtagatgatgggtctggtgattacctccgtaaaggtggtcttaaaattaataacaactttgatgatttatattcagagttaggtgatggttcagttccattcgcggcaggtgcatggaaaacttttaaagctagccctactggaactactttaaatgctaagtttggtcaggcctttgctattaatacccaggcagcaagagttaacgttcagcttccaaagggtacagccaacgactataacaaagttattaaacttcgtgatgtttggtcaacctggcgattaagcccaatcacagttattcctgctcaaggcgatacattaaagggttcagcttctcctaaaattttcaatactaacttccaagatttggaattggtttattgcgcccctggccgctgggaatatattgaaaataaaactgtagataagctaactaatggtaacttaagtactgtagcgaaaaaatcaattattgctactgcgggtcagactgactttcttaacatttttgatggcgtagaatataacgaagactcgcttaatgtatatcgtcgtggtaatattttatattacggtgaaaccagcgttatggataaagccaatgctgattacggttctcctggaacagtagcaggtcaattggtagaattaaacggtaaagacattcgtttaaaagttccatgtgttgaaggggaagtaataacatttgaaaccttcctagatggaattggtgtttatcggtcttcatacaacaagttggctatccagatacgagattcagcccagactacatcccagacgattcctgggtcaatgatagtagataaccttgctactctccgcagaatcactctggatgacatgggtgtacttccaggcgtaggggtaaatcctaactcgcttgaaatttcattgaacggaaaggaattactcgaagctggaactgcaggtcttcctttattttattgtgaaggtgcggaaggtggatatgcagaagactgtataaacaatggtggtcaatgggtaaattctaaccaagactatagactggaatttgactcaactggtactaacgtcgaagctattatttttggtgaggcgtttgaagataaagaccttcttaccgtccgttggttcaataataacatcggtactactatggatattgatgatatcatggcagaaaccgaccaagtgtatatgaatgctgagcaattagtaactctaaaaaatcgcattgaatacacaaattatgatgaacctaatcagaaaaatatgcgtccggttgctgacgatattatgattaaagtcaataatattgcagcgttttttgacgtaatttatccgattggcacgatttatgaaaacgctcataaccatgcgaatccggctgattatatgggatttggtatatggaaactttattcgcagggtcgtgttactgcgggttggaataatgattcatctgatccttatttttcgcgtaacaacaataacttaaacgaaaatggtcagccatcattaacagcaggtggaacggttggagatttgacatttacgttaggaaaagaacacattcctgaactaatgtcaagagataaagttctaatttcagaccctgaacatggaagcgtagttatcggtggatgtcaattagacccagacgcacaaggaccgggttattctaaataccgtgaagacactgttgcagtaaataatggtgtagttccaaaggacatcactaaaattcagccaacaatcaccgtttatcgttggattagggtaggttaaaatgacgattgaaactaaaactcgtgaaggagctaaagttaattcaagactagctgctttttcagaatatcgtgtagacccgcaaaacattgcggtaggaaataaggctccggtagggagcctaacctttgaacaaatggatttaggagtttggtatccaaacactgaagctgctattaatgatttgatgtcattgcagtcagcagaaattggaactattatttgcaatgacactggaatatctccacaaccagcacagcaaattacacgcgctactttttcaggcgtagttgcgttagagccaaaagaagacggctctgacggtgacccagtaataattcatattcttggcttaccaattagaattgcaaacggtgatgactttgcagcagtagcaacacgttggtatgataaagtaaaagaattagaagctgttggaaaggttgttcaacaagttactcaatcgccggcaacaccccagtatgttgatattattcatttagattatcagaaccataattttgaaacatataaaaagtatggtttaactgttgaatttactattacttcacctgctaaagcgggttatgggcaatgggatgctatcggcaacgaatctaaaaccttcggcgcgaacacatttactttccactattttagaaggatgggataatggcccagaataactataatcactacagtgatttggccaaatatacgatatttgacccaacaaatacacaatggcctgttgctataaaagacgtccaatcagcgttagagctgattggtagctgggcaagaactgataccggattacctgtagcatctcctacagtagccggtgtaattcgcacagcaacacaggctgaagttgatgctggaactattggtaatgctgcggtaactcctgctacattaaaatccacagttacccgtcctgaagcaactacagcagttcttggcttaacacggtatgctactaatactgaagccgcagcattaaccgcaggaaatagaactattaccgcggcggctctcggtcatgtgtttaaaactgtgaaagcccaagaaaacgtagatggaactgttaggttaactactgcggctcaagcacaagcaggaactgacgaaactaccgcagtaactcctaagcgtgttgtagaaatgattggaaagttcagcgtcagtcctcctagttatacctctgcaacagaaagcaacttgggattagttcgtgtcgcaacccaagcccaggtagcagcaggtgctgttcacgatggatacgcagtaactccaaaaaccttcatggcatcaaaagcgtctgacagtgtatttggtatagtaaaatttgctaaagactcagatgtggcttcagctacttctaacaatttggctgttactccaaaaagtcttcaagcactaaaatccaccaaggataaatatggattaaccagattatcaggttctccaactactgatgcttcattggcagcggctgcaacagatgcagtctttaaaacccgtagaataaacggaaaaactcttgataatgacataacaattactaataatgatattaattgttatacaagacaagaatctgacgggcgttacatgccagctggaaccagagtaggtaatgttacttgggttgaaggacaatcttggattagtcgaggtgcaacgtttacatgtaatgcaccatgggaagcttctagtagattagctctaaatgttaatgtaaaatttgagcgtaacaacgacggatatgacaatcgtattttcagatttgttgtaatagttaacggctcccaatggggcggtgaacttactcttaacatcgaaaatactaaaggcggacgaaatggtcattcatggagatttgaagcttacgcatctagcaactttttcttcaataacattcctccaaatgccactgttcaaataagaccaacagaagacagtcgtattatattttatgactgcatgcttacattctgtacaaatagaccgtaaggaataatatgaccaaactagtagattcgcttccgtttgtagacggaattccagacgattttcaacagagaattaactggataaaaaatacagagcctcttaatggggcttcaacccgctatggaaatgatggagaactgaatagagcttctgtgcagattcagaaaaacgttgttcaggtacatagtgacttgaatcgtgttggagctgtagtagaaaatgttcaagtagatgtagaccaaatcaaaaaatcgttagaaatcacaggttcttctgatgccattgagcaggtttatatcaataaaaagaatattgaaaagcatggtggacaaattcttaaattagaagaagacaccacaaagattagaactgacctcgattttctcgaagaggatgtgggtgtttatgattctagtaaagatgactattacagaacagttcgtgataatatagtttgggttaaacgtgaaattggtgcgtatcctgggcaagatattaacggacagccgaagcaagactctccgggttctggtatgaaataccgaatcatcaacaatgcgtcagctatagtaaagcatgacgagcgtattcaggcgctagaggatgcatacaatgattcagacgtaggttctctgactattgaagtaaacgacctgcgtaaagaagttggtcctaaatccggagctacgtcagcttcaatttatgcaaggcttgtgaataacgctgatgctatttccgcagctaataatgaaatctttgctattaaccaagccattgattttaccaatccagtaaaaattggagctcgtactactagattagaaaacgattatcgtatagttgacgcaacacttaactctgcacaaaccgggttagttcctcgtgtcaataatattgatgctcgtttggggtcttctgataagcctgatactattgaaggaaaaattagttctctttcaactgaccaagggtacatttctgatgttgtaggacgtgatacttcatcaggacttcagggtcaagtagcatggataaatcagcaagttggtattgttcctggcggacagccgattcctccggggtcaattttagcgagaatgaccaatgttgaagggatgcaaaactctcagcagtctgctatccaggacattcaagtagaacttggcaataacagcgaagggttaaaaggttctgtatttacgttacagactcaaatgaatggtgacttttcgtcagaaaatccggttcagcgggatggtgtgtatgccactgtagtagaattgcaagataaattcgtgactgcagttactgacgtagaacaagatggagcatacctccgtaaacggggcgaatggtttaagaagccttcatcaataggtgaattcagtaaagaagatttcactgttgatttaagttctgatgcattggtaaatcctaactcattggtcgctgcttcatttaatgctggcattcgtattgttgatgatattattgttgatgacgatggcgtattttgtgtagaaactgatacagttatcgaagcttctgattcagataaagctgtccaaattgttattctcgtcaataacattgaggtgtttacttatagcctaggtgttaaagcagtaaccggcgagcaactgttgaaaaccaagaaacttattaagttttcgtctggcgatgcaatcaaaattgtgtatagagctgcttcagaagaatcaaaagttcctgttagtattaaatcattggatattactattcatccagcagtataatgaaagggaccttcgggtccctttttcgtataaatagaatataaagaggagcttatatgtcatacaacacatacaacccaaaaacgcttaaagacgctatacttcgacgtctaggagcgccggtaattaatgtcgaagtaactgaagaccaaatttatgattgtattcaacgagcattagagttgtatggtgaataccactttaacggattgaataaaggctatcaagttttttatattggaaaagatgaagctgataatgaaagattcttgaatggcgtatttgatttacgtggtcgtaatgtatttgctgtcactcaaatcgttagaacaaatgtaggttcattaacttcaatggatggtaatgctacctatccgtggtttactgactttttaatgggaatggccggaattaatggcggaatggggtcaagctgtaataagagttatggaccaaacgctttcggtgctgacctgggctattttactcaattaatgacttattggtcaatgatgcaggatttgcttgccccacttccagactattggtataactctgataatgaaatgcttaaagtaatgggcaacttcatgaagggagacatcattgtttgtgaatgctggactaaatcatttatgaataccgacatgatggtaggtaatactgcaggttacggcttcgctggtgaacaaacttccgaccattggggcttaggagataggtatcagaatcctaaccttcgcaataacggccaatatgcaggtgaaggtaatacaaatagagaaggtgcttataataatcgttgggtaaaagattatgctacagcactgactaaaaaattgtggggtgaaattctgtttaaacaccaagggctacaattagccggcggcgttacagttgatggccaaacacttaaagtagaggcccaagaagaaatcgagaggctccgagaggaacttgatttacttgacccgggttgtcctattctgttggggtaaaagatgactacatttaattctagtttattcgctcgccttgaggattaccgaggatacaataaaactaatgagacagaaattctcaatccttatgtgaatttttataatcacagaaatagccaaacgttagcagatgttttatcagctgaggctattcaaatgagaggaattgagttttatttccttcctcgcgaatataacaatccggatttgcttttcggagaagacccatcaagtaaattcaccaaggcttggaaatttgctgcttacttagactcttttgacggttattctggtgataacacgttcttcagtaaatttggtatgatggttaatgatgaagtcaatttgactattaatcctaatttgttcaagcatcaaaccaataattcagaaccaaaggcaggtgacctgatttatttcccgatggataattcgctgtttgaaattaattgggttcaaccatatgatccattttatcagttaggtcaaaatgttcaacgtaagattactgcgcagaaatacatttattccggtgagcagcttcaaccagaattgcagcgcaatgaaggaattatcattcctgagttctctgaacttgatttagaaccaatcaaaaacattgattctcttgctgatatttctgacgtacaatacgcagaaagcgatgcaattaataaagaagcctctgaatatgttcatccgtattatgttaataacggaagaggacttgagtctcctcctaaagcagattcgtttgatgacggattttttgaataaataaaataaagatgggacctttgggtcccttaggagaaatcatgtttggacattggtataattcgtccttgcgccgatacattgtattgctgggagatttattttctcatatacaaattgctcgctggcgtgaagacactggactaaaatatattaaagtacctatcacgtatgcttcaaaggaaaaattcctttctcaacttgggaaatggactgctgttcagtctaccgagaataaagcaaagatagaaactgttttgccaagaatgaatttacacttggttgatatgcaatacaacgcgatgtataaaacatcacagttgaatagaaccaaatcatataaaaccccttcaaaaattacatctcagtataatcctactccgattaagatgatttttgagttggggatttatacgcggaaccaagatgatatgtatcaaatcatcgagcaaatcgttccttattttcagccgcattttaacacgactataactgaactttacgacaaagacacgagctttaaccgtgatgttagaattgtattacaatcattttctccggatgaagctgttgacggagataatattactcgtcgtagattagaatggtcattgatgtttgaagtcaacggatggctatatcctcctgtagctgaaattgacggcgaaattagaaccatttatttggatttcttcgctaatagtaaagaattaacaccagaaggaaattttgaatctgtggatagcgaagttactccacgtgatgtccagcaagaaaactgggatggttctagcaaacagacgtattctcacgatattcctattccggtaaatccggaggctcctggaccgagaggtgaaaaatgagtgacttacaattagatatggctaaattactagacatcgaaggaattcccggaatagaagggcaagaaattccggtttatgaaaaattagaattagtcgaagttaaatctaatccaaatgatcgtaaacctgacctcgaagacgactattctgtcgttcgtaagaatatgcacttccaacaacagatgttaatggacgcagctaaaatatttttggaaactgcaaagaacgctgattctcctagacatatggaagtatttgcaactcttatgggtcagatgaccacaactaacaaagaaattcttaagcttcataaagaaatgaaagacattacttctgagcaggttagtactggaaaaggagctaatcctcaacaaggaatgaatattcaaaacgcaacagtctttgtaggttctactgccgatatgatggatgagtttggagacgcctatgaagcacaagaagctcgagagaaaatagtaaatggaacagactcaaccgtttaacgttctgagtgatgcacatcctttaaatgacggtaaacaagtggttattcgccacccgtctgaaatggaaacgaaaattgaaaatggaattcgtttcttcaaatcacaatgggatgataaatggtatcctgagaagtttgaagactatcttaagttgcatgggatagttaaaattcgtttgcagggtgaagacccagctcatttccaaacgtttaaggataaaaataataagcgcactcgatatatgggattgccaaaccttaaacgtgcaaatattaaaatgcaactaactcgtgaaatagttgcagaatggaaacgctgtcgtgatgacatcgtgtacttcgcagagacttactgcgcaattacgcacattgactatggtaccattaaggttcagcttcgtgattatcagagggacatgctggaaatcatggcagccaaacgtatgacttgttgtaaccttagccgtcagcttggtaaaactactgtagtagcaatattccttgcgcactttgtctgttttaacaaggataaagcagtaggtattcttgcgcataaaggctcaatgtctgcggaagttctcgaccgtactaagcaagcaattgaattacttcctgactttcttcagcctggtattgttgaatggaacaaaggctcaatagaattagataatggctcatccattggggcatatgcttcgagtcctgacgccgttcgtggtaactcatttgcaatgatttacattgacgaatgtgcgtttattccaaacttcatcgatgcatggcttgctatccaacctgttatttcatcgggtcgtcgttctaaaattattatcacgactacaccaagtggattaaaccacttctatgatatttggacagcagcggttgaaggtaaatccggctttacgccttatactgcaatttggaactcggttaaagaacgtctatataacgacgaagatatgtttgatgatgggtggcaatggtcacttcaaactatcagtgcttcttctcttgaacagtttaaacaagagcactgtgcggaatttcatggcacatccggtactctcatttccggtatgaaacttgccaatatggattggattgaagttactcctgactcgcacgggttttataaatttaaagaagcggaagcagaccacaaatatattgcaactcttgactctgctgaaggacgcggacaggattaccatgcactaaatattattgacgtgactacatctgaatgggaacaggttggagtattacattctaatacaatttctcacttaatcctcccggatatagttattaaatatctaatggagtacaacgaagctccgatctatatagaacttaactctacaggtgtttctgtagcgaagagtctttatatggatttagaatatgagaatgtcatttgcgattcaatagttgatttaggaatgaaacagacgaaaaggtcaaaagccgttggatgttctgcactaaaagaccttatcgaaaaagataaactcattattcaccatcgtgctactgttcaagaatttcgtactttctctgagaaaggagtgtcatgggcggcagaagatggatatcatgacgatttaattatgtcactcgtaattttcgcatggttaacaacacagcaaaaatttgctgatttcgtggataaagatgaaatgcgtttagcatctgaagtttttaaacgcgaattagaagatatgaacgacgattacgctcctgtagtgttcgttgacgccgtgaatagcgcagaatatgcgcctcaagaacatggtctttcatttgtataaataataaaaagcaaacaacattgaggatatatcatgcctttagtctctcctggaattgagctcaaagaaacgagcgtacagagcacggtagtacttaacgctacaggtcgtgccgcaattgtcgggaagttccaatggggtcctgcatatcaagttacccaaatcactaatgaagttgaactggttgatatgtttggtggtcctaataaccaaactgctgattattttatgtcagcaatgaactttctgcaatatggtaatgatctacgcaccgtccgtgtagttaaccgtgaagctgctaaaaacgcatctccgctggttgataatattgaatgggaaatcacaactgctggtagtaactatgaagttggtgataaaattacggttaaatatgcagaccaaactgtagatgacactggttcagttactgaagtagatagtgacggaaaaattatgtcggtgttcattccgacggcaaaaattattgcatatgcaaaaagcattaatcagtatccggatttaggtgattcatggacaactaccattacttcacaaagttctggtgtttccgctgttattactctgggcaaaattatttctgattcaacagttctgttaactgaacctgaaactgcccatgaagaaatgacaaaaactgaattccagactgcgcttgcacaatataaaatgcctggaattgtagctgcgtatcctggcgagctcggaaatcagttagaaattgaaatcgtatcaaaagctgcattcgataaaggtgaacagctgacgatttatccggctggtggacagcgtgcatcaaccgcaaaagccgtatttggatatggtcctcagaccgatacacagtacgctatcattgttcgtagagatggtgcggtagttgaatcaacggtgttatcaacaagccgtcaagataaagacatctacggaaataacatctttatggacgattatttctccaaaggttcttcacgttatatatttgctaccgcgcaaggatggcctgaaggattttccggtgttattcgtctgggtggtggggtttcagctaatgaatcagttactgctggcgatttaattcaaggctgggacttatttggtgaccgtgaagcattgcgtgtaaaccttctgattgctggtgcttgtgccggtgaaaccgatgaaatcgcaagtacagtacaaaaacatgtttcgtctattgcagatgagcgtcaagattgtttagcactcatttcaccaccaaggtcaacgattgtaaatattcctctgacccgtgctgttgataatttaattgattggcgtcaaggtgaaggaagctacgactctgcaaacatgaacatcaatactacgtacgcagcaattgatggcaactataaatatcagtatgataaatataacgacgtaaaccgttgggttccactggctgccgatattgcaggtctgtgtgctcgcactgatgatattgctcagccttggatgtcaccggctggttatcgtcgtggtcagattctgaactgcattaaacttgcgattgaacctcgtcaagcacatcgtgaccgtatgtatcaagcaggtattaacccggtaacgggtcaaggtacaggtgatggtttcattctgtttggtgataagactgcaaccactgttccaactccgtttgaccgaattaacgttcgtcgcttgtttaacatgctgaagaacaacatcggtgattcttctaagtggcagctgtttgaattaaacgataactttacccgtagttctttccgtatggaaaccagccaatacctcgcaggtattaaagctctgggtggtgtatatgacttccgagttgtatgtgataccacgaacaacactccagcagttatcgaccgcaacgagtttgtagcgagcttctacatcaagccggcacgttcaattaactatatcactctgaacttcgttgctacggcaactggtgcagatttcgatgagttaatcggaccacagtaatatgaaccccaggacattctggggtcatctaatctttagatgataaattatattaccgcacactttaatagcctctacgatgatgtagtcaatcgagaggctatataaatatctataggaaacaacgatggaattaacagacatcactcgtgcgtttgaatctggtgactttgcgcgtcctaacctgtttgaggtagaaattccttatctgggtcgtaacttcagtttcaaatgtaaagcagcaccgatgccggcaggtatcgtagaaaaagttccagtcgggtacatgaaccgtaagattaacgtcgccggtgaccgtacttatgacgactggactgttaccatctataacgatgataaacatgaagtacgtaaggcaattattgcttggcaggctcaggcccacgcccaaggcaatgatatctctggtatgactccagctgattacaaaaaggttgctacggtacgccagtttagtcgtgatggcaaaactatcacaaatgaacacaccattactggtctgtggccaactaacgttggtgaagtacagatggactgggattcgaataatgaggtagaaacgttcgaaactacctttgctattgactggtgggaataatgttatggggcttcggccccgtatcgaagttctgtgagttatttgcttaaatatctgacaaaacttcgatataaatatacttatagataatttcggagactccaatggcctttcatattttggacttattcgctccgtgggaaaaacgcgacgaagctgaatataagcaacaaatcaacaatgacctagagtcaatcactgctccaaaatttgatgatggagctcgtgaagttgaatcaaacgaaaacgaaatccagtataattcattcaaccaaatgatgtttggttccaatgaacctggaatgaaaacaaccgctgatttaatcaacacttatcgcagtttaatgaataactacgaagttgacaatgctgttgaagaaatagtttctgacgcggttgtatacgaagacggtcacccagtagtttctcttgatttagattctactgacttcagtcaagcaattaaagaccgcattcttgaagaatttaatacagttttaacatgccttaatttcgagcgaaaaggagccgaccatttccgccgttggtatgttgactcaagaatattcttccataaaatcgtcaacacaaagaaaatgaaagacggaattcaggaactgagacgtcttgacccgcgcaacttacaattcatccgtgaaatcgttaccgctgatgacgctggtactaaaatcgttaaggggtacaaagagtatttcatttacgatactggcaaagaaagttattacgcagatggtagattatattccgccggaacgaaaattaaaattccacgcgatgctatagtatatgcacattctgggctagttgattgctcaggtcaaaacatcatcggttatttacaccgagccgttaaacccgccaaccagttaaagctattagaagatgcgttggtaatttatcgtattactcgtgctcctgaccgtcgtgtgttttacattgacactggtaatatgccttctcgtaaagcggcagcacacatgcagcatattatgaacacgatgaaaaatcgcgttgtatatgatgcatcaaccggtaagattaaaaatcagcaacataatatgtcaatgacagaagactattggttgcagcgtagagatggtaaagcggttactgaagtagatactcttcctggtatgtccggtatgagtgatatggatgacgtccgttactttagaacagcgttatacatggcattgcgagttcctctttcgcgcatgccggatgcaaataatcaaggtggtgtgcagtttgatgctggtacatcaatcacacgtgatgaacttgattttgccaaatttattcgtagattacagcataaattcgaagagattatgcttgatccacttcgcactaatctaattcttaaaaaagttttgtctaaagatgagtgggaagacgaaataaataatattaagattgtgttccataaagattcatatttcaccgagttgaaagatgctgaagttatggagcgtagaatcaatatgctcacaatggctgaaccgtttatcggcaagtatatttctcataagacagcaatgaaagatttccttcagatgtctgacgaagaaattgaacaagaagccaagcaaattgaattagagtctaaagaggctcgcttccaagaccaagaaaatgaagaggatttctaatggaaaattatatttccgcaattgaatccagagacctcgtagcagccaaaaaagcttttggtgcaattatggctgaacggacatctggtttaattgaagagcgcaaaaaatttatcgcagcgtctgtcatgattgagggtgaagagcccgttgacgatgaagatgaagacgacgaagatgaagataagtctgagaaagacgacgacgaagaggacgagtaatgcttatactgcctgaaaatcatgaattagttatcgacgctgtcgaagcttttcttcctgaagcacaggcacgttttgataagttgtccgcagcgctttctaaagatgatataaataaaattgtagagaacatggttacttctgagcctgatttagcaattgctttaggttcaattaacgaatctctacaattaaatgaatttatcgttaagcacgttgattctaaaggtactattacccgtaccaaagatcgtaaaacacgtgagcgtaacgcgtttcaaacaactggactttctaaagctaaacgccgccaaatcgcgcgtaaagcagtaaaatcaaaacgtgctaatccatcggctcaaattcgtggattacgtaaacgtaagaaagcacttaaacgccgtcaggctctggggctaagttaatggaaaacctcaatgaacaacttttaattgaacattggggtcaaccgggcgatgtgattgatggtaaacccatgctggaatctattatcgttgaaggcgaaaatgaatctggcttaaaacctggtctgtatatcgaaggtgtttttatgcaggcagaagtagtaaaccgtaataaacgtctttatccaaaacgcattcttgagactgcggtaagtcgttatattaaggagcaggttgctactcgtcaggctctaggagaattaaaccatccacctcgcgcaaatgttgacccgatgcaagccgcaatcattattgaagatatgtggtggaaaggcaacgatgtttatgggcgagcaagaatcatcgaaggagaccacggtccaggtgataaattagccgctaacattcgtgctggttggattcctggtgtatcaagtcgtggacttggttctttaaaagactcaggaaaaggatataacatcgtacaagaaggctttcgcctgactgttggtgtagacgcagtttggggtcctagtgctccggatgcatgggtacaaccgaaacaaatttcggaaaatacctcggcacaagttgccaatagtgctgatgatgcttttatggctctcgcagagaagttaaaagcgttataaataattatgtaacttaacacaggacatcaaaaatgcttaaagaacttttaatgaccgaagctaaaactatcgatgcttccgtcgctcttgacagtattttcgaatcagttcagctttctccggaagctaaagctaacttcagcactgtattcgaagcaacagtcaaaaaacacgccgtagctctggcagaatctcatattgaaaagattgctgagaaagcagaagaaaaagttgaagaagaaaaagaaaaagctaaagaagaagctcgcgaagagctgaaagaagctgcttctaaatactttgaccatatcgctgcagaatggatggcagaaaaccagctggcggttgaccgcggtattaaagctgacctgtttgaatccatgtttgtcggtatgaaagagctgtttgttgagcacaacgttgtaattcctgaagaatcagtagacgtagtcgctgaaatggaagaagaacttgctgagcaaaaagcagaaactgctcgtttatttgaagaagtttctaagcgcgatgagtatatcaattatgcccaacgtgagtatgctatccaagaagcaacccgtgaactgactgatacccaaaaagagaaagtagtttctctgacagagggcatggattattctgacgcattttcaactaagctgaaagctattgttgaaatggtgcagggttctgtagagcagtctgtaacggaatctgccgatataaatactatcgacaaagaagcagacggtttaaacttcacaactgaagcagtagaagaaactcctgcgactaaaaccccatccgttatggatgcttatgtggcccaagcggctcgtctttcttaatttaaaaggttatacaacacatgaaaaagaataaacttatcgaaaaatggcagccgctgcttgagaacgaagctctgccggaaattgttggcgctagcaaaaaagctctgatcgctaagatttttgaaaaccaggaagctgatattaatcaggctccggaataccgcgatgaaaaaatcgctgaagcatttggttctttcctgtctgaagcagaaattggcggtgaccacggttatgatgcacagaacatcgcagctggtcagacctctggtgctgtaacccagattggcccggcagttatgggtatggttcgtcgtgctatccctaacctgattgctttcgatatctgtggtgtacagccgatgtctaacccaaccggtcaggtattcgctctccgcgctgtttacggcaaagaccctctggctgctggtgctaaagaagctttccatccgatgtacgctccagatgcaatgttctctggtcagggtgcaaccgagaagttcgaagcagttaaagccggtgatgctctgactgttggtgatatcgttgttcacgatttcgcacagaccggtcgtgctcatctgcaggttgttgaagatttcactgtagacgctggtgctaccgatgctgctaaactggacgctgcagttactgctgctctggaagctggtaaagttgtagaaatcgccgaaggtatggctacttccgttgctgaactgcaagaagcatttaacggttctaaagataacccgtggaatgaaatgggcttccgtatcgataaacaaactatcgaagcgaaatctcgtcagctgaaagcacagtattccatcgaactggctcaggacctccgtgctgttcatggtatggacgctgatgctgaattgagttcaatcctggctaccgaaattatgctggaaatcaaccgtgaagttgttgactggatcaactactctgcacaggttggtaaatctggtatgactcagactgttggttctaaagccggtgtattcgacttccaagacccgattgatatccgtggtgctcgttgggcaggtgaaagcttcaaagctctcctgttccagattgacaaagaatccgctgaaatcgctcgtcagaccggtcgcggtgaaggtaacttcattatcgcttcccgtaacgtagttaacgtactggcagctgttgataccaacgtatctccggcagctcagggtctgggtcgtggttataatactgacaccactaaagcagtatttgctggtgttctgggtggtcgttaccgtgtatacatcgaccagtatgctcgtcaggattacttcaccatcggttataaaggtgctaacgaaatggatgctggtatctactatgctccgtatgttgcactgaccccgctgcgtggttccgatccgaagaacttccaaccggtcatggggttcaaaacccgttacggtatcggtattaacccgttcgccgattctgctgctcaacagccgaaaggtcgtattacctctggtatgccttctatcgtcaactctgttggtaagaatgcttacttccgtcgtgtatgggttaaaggtatctaataccaataagggagccttcgggctccctttagttgttttaatggatataaataaacttataaatccacagaggaaagcgcaatggctaaaatcaacgaacttctgcgcgagtcaactacaacgagtagcaacttaattggtcgccctaatctcgttgcattaacgcgcgcaaccactaaattaatctataccgatcttgttgctacacagcgtactaaacagcctgtagcagcactgtatggtattaaatatcttaaccctaatggtgacctgacgtttaatacgggtgcaacttatgcaggtcaaatcggggcgccagaacgtgagtcaattgaagaactcactatggcaaataaagactcattcaataaagacgatatgttcaaatatcagaatgtggtctttaaagtacttaaagacggaccgtttactggcacagatgaaaccgatgaatttggaattgtatctgaagcagtagcagctaataatattcgtatgttgtcagatgctgcagtcactgaaaaatttgaaggacccgattcagacccaatcaccgaagccagttttaaaattgataaatggcagacccaggttaaatcacgtaagcttaaaacagatttaacagtagaattagcccaagatttagaagctaatgggttcgatgctccagaacttattgatgatttacttgctactgaaatggcagaagacattaataaagacatcctgcaatcattgattactgtttcttctcggtttaaagtagctggtgtatccgataaaggtgtattagatttaactaagcaggattctgctccggaacaaggtcgtactctgtaccgtttcatttgtgaaatgaactcagcagtccaacgtaatacttcttattctggtacttacgcagtagcatctactcgttgtgctgcggtgctggcagcttccggttggttaacgcagaagaatgatggaagtattccagaaaacgcatacggtatgctgaataatggtttacctctttattgcgatactaacagcccagttgattacgttattgttggtgttaaggcagaatttggtgggaaggaaactgtaggttcattattctatgcgccgtacaccgaaggcttggatttagacgaccctgagcatgttggtgcatttaaagttattgttgacccagctagcttgcagccttctgttgctttactggtacgatatgcattgtcagttaacccatatactgtaggattggacgaggacgaagctcgtgtgattaatgctgcggatatggataagatggcaggaagaagtaagatgtctgtactgctcggtgttaagttacctaagcttattgcggactaatttatggggagcttcggctcccctttttgctataaactaaatatgtcaaacctcggggagtattcctcctcgagggatttaaacacgttcttatcatagagattaacacattctatcccgtgcctgcgagctatatcaacagctactctcgtccctccagatacactcccgcatcttttttcaggcgcccaatataataccttatctacaggctcagtgcattctaggcccaatacctgcatagaattccgtgcgaataatgtctgtactattttcgagcattcatcccagtacgacgtaacttctctcgccttaatgatgcttttgattttggcttcgtttgataattcagaccatacaacaacacctgtaccaggaacatggccacaaaagccagaataaggaataatcctacaagaatttgacctatcgtatttcgccaaccacgcttcatctgaacccggagctccacctgaatatgaaaaatgcccctcttccgagaggcgttgacctattgtagtcattagactcagaactctgcgtggcgcttctcgtgaaccaataagcgccaatctcattattctaaaacctcatgccatttactacgaatagtgttttgaattaaagtagtgatttctttcttaactgcagaaggattatcagcgaatagcatgtcatgaccttcacgtgctgcttcgttaatgatatctttcatagtcagacccataacacgaccgaaatctttagcagttacagtaccaatatgagacagaacgttacttacacggttccaggttacatattcagaaaagatttccagaacacgcttatcagtatcagtgagttcaaccttagctttaataggcttatcggatttagccttctcactgaacttagagttcttacacttaatagctacacgggtaccattattgaagaatttaggatgaaccggtttaagaacataaccttcagctacgccggtttcagaagaagcctgtggaccgaacacatgtttatttgcgtgttcaaggtcagtcgtgtcaacaagctcattatagtaattgacaatagatttaaagtcattcacatactgagatagctcagcaaatgaacctcgaccaagaagtggagccaatttaagaccaagaccagtagcaaacgattctactacataatcgtcccaataaactttttcgttaccggaatccgacaagatatcaaatacgtagaaatctttctcaccatagtctacgcctttctgaataccgccgccggcaaattcgccgaagatttgaacagatactaaatccatggcgttcagcatgttctgcatcttaacgaaagaatccttatacttcttcatgataatatcatgaccgaagaagctttcaccttctaaaataggaccagtacgcttagccggaacgatttcggtaggagtaataatcacactaaagttagtgccatgaatcttctcacgagccacccactcaacagtatgcatatcaaaaccagcaccgcgaatcttctcgatgaacttaccgttgtaatgattctcgagactagaatattttgcaaacattataatttccttagaatgtgattttcataaagtcagtatcaccattacgctgggcactggtataatttgtaacaaatccttcatcatgcaaataattaagaacacttgtaatatgtttcttaactagactactcggatacataattaactcacgcttacccgctaaagcggttttctcaatttgagttaatacttcttcttttgctgctgataattcttctgtggctacgttaatagcagtattagccattctatcggcaaggttcataatttttctctcaataaataaaaccaggagtccatctatcttggacaagggtaatggtatcagaggatttcccctgagcccattataccacatcgatttttaaagcaattaatatccgcttggaacaaagcgatacatgatatatccgcttttagttagcatgatttcaaattgacttttgcttccaacctcaagtactaatggaatatctttatccatcagcatccaatcaatttttccataccgttcattaatcaaatccgttattttacgtgcaccacttttatagtagtaagaactctgaacagccatcattttactaacaaatttagatgcaaacaaccagacatttaccccattagcagctggcgtaaatttcttagaaagcatttcttcaaatcgttctactacaattgggtctactttaggcattttcataataacctcatgtgtttaacaagtttcttatgacgagattttataccaacgtttgttaagcgtttccgataaacgactttttctttttgcttaaaccgttcgtgtgctttctcaacagagacccacagcttagcggcttcggctggagtgatatctaacgcccttgcaatttcttgaaaatcctttccgctttcatgcatcaagtgagcttgtaatgctttcataataacctcatctatgtgacgaggacataataaaccaatccgtgaatagcaaaaagggagcccgaaggctcccaaatattacggatagataatacctgcttcaagcgcagtacgatgaacaatgtatccatttctagattcttgtacatcgacttctggataatcatctagcattttagctagagtataccgatgcaggtaataatcgctgtcagggtcgtcgagtttccaatctttgccctcaacagtcattcgctggatttcatccattacccaccaaccacaccagatataggctgttccacggaacggtagaggatgaatatacggaagttctccgtctggctcaggggctactcttttggtaatagttacatcgccagttttagtgactgtaatcggggtgtaatcttctgcggaaacctcaacggaaacctcaatcacttgagaccctatatcagacgtgtcaatcactaacgtgcttgttgagccttctacaggtgaaccgtctttagtccaagaataaaccccagttgcaccttctggagcaccgataacgttggctttaaaagatgcttcagacccctgctcgactgtaatagattcaggagtcaaagtaactgaaacaccgctcatggtctttttggtaatcgttacattaccggttttagtaactgtgacaggtttataatctggagcagaaacaacagcagaaacctcaattacctgcgacccgatagtggatgtatcaatttctagagtactcgttgaaccatcaacaggtgaaccgtctttggtccatgaataagctacagatgctcctgcgggcgctccagtaacagcagctgtaaaagacgccttggctcctttttcagcggtaattgaactaggcgtcaaagtaacagaaacaccgctcatggtctttttagtaaaagcaacagcaatacctttagttgcagttccattattatagtctggagcagaaaccgtcacttcacaattcaatgtgtagctggtttccgttgattcagttaaggtaattgttttacccgtttggccagaaataacagaagagccgcgtttccaaacataagcaatgcttgctcctgatggggcgccagtaacatcagccgtgactacttgtgattgtccaatttctttagaaacagaagtcgggctcaaagttaaagtaatcgcaggcatagttttgttcttaactgtaagagtggtttctgcctcagcagtttctgcctcaccctctgctggggtaacagtagcaactactttaacagtcttactgccggcaggtcctgcagcaacataattcatagctgcggtaacagaagattgttttacgccatttactgtccatacaaacgtttctgtgccttcagctgtggctccagaagttgttgcagtaaaattggttgttgctccaatgactgccgaagcagccaaaggagcaatagatacgctataagccataggtgttccttattttaaagttacaaatgaagaattacgtgtttcacgaatcataacagacccgtttcttttgatgtaatagattaaactaaacagtgtctggtgtgctgatgggtgttcaaacgacgttggccgagatttccaatctgggttatctttaatccattggtaaatccaccatggaagagtaatatatcctgggttcttacctagcaattgcatgtttggactaaagtttttaggaagctcaatgatttcgtctgttttaataattttaactactttgtccattgctttgaaaaattcttcggggtccgtgatactaaccggaatattggtaacttgtccttcatcatctatatgaataacgctgtctccaataggagcttcagcataaaatcctttatcattgatagaaggtgtttttacttcaaaccctgggtcatttaccttaggggtttctttatagaaacctgggtcaatatcatgaattttaataccagcattaactggagcgtcaaacaacagttttgcctcatcagacgcttcatctttaaatactgctttaccctcaatttcatcatctgcttggattaaatcagcaattgacagcccatcattatcttctggcataggctcatcggccaatttagccagttctttttctaagtcagcaaccatattgtcaaatgagcgggtcttcttcagtttaataccgaatgttttggcatattcgtcgagcttgtctttagcttcttttttatcgagtgcctgaatttctttaatatagtctttatctagcattgggtgtgcctcatgtaatgtataaatatgattgtatttataaactgaggatagtacagtgcacgacatccaagtcaaatttaaagattttagtcatgttcatattgagtgtgatgactcgattttctatgaactcagagactattttagcttcgaagccgatggatacagattcaacccgaaatatcgttatgggcattgggatggacgaattcgtctgctagattataatcgtctcttaccgtttggtcttgttggccaaattagaaaattcgctgaccaattcggatataaagtttatttcgatccaactatattcgagcaagaaactctttcacgggaggatttcgacacgtggttagcatctaaagaaatctattcaggattaactaagattgaaccccattggtatcagaaagatgctgtatatgaaggactagttaatcgacgtagaattcttaatcttccaacgtctgccggtaagtctcttattcaggcattacttgctcgttattatgtagaaaattacgaaggcaaaattcttatcatcgttcctactacagcgttagttgaccagatgattgatgatttttgtgattatcgtttatttcctcgcaatgccatgctgggtattcgaggtggtactgctcgtgattcgaatgcattagtttatgtatctacctggcagaccgctgttaagcagcctaaagaatggttttctcaattcggcatgatgatgaatgatgaatgccatcttgcaacgggtaagtcaatttcaacaatcattgcgggtctcaccaattgcatgtttaagtacggactgtctggttctcttaaagacggcaaagctaatatcatgcaatatgttggtatgtttggtgaaatcttccgtccagtatcaacttccaaattaatggaagacggacaagtaactgagcttaaaattaatacaatcttcttaagatatccagatgcagccgcaaatgctttaaaaggaaaaacgtatcaagaagaaattaaattcatcaccaatgttaagaaaagaaaccgttgggttgctaatcttgctactaaacttgcagcgcgtgacgaaaatgcctttgtgatgtttaaacatgtagctcatggtaaagagctattcgagatgattaaagctactggtcatgagcatgtctattatgtgtcaggcgaagttaataccgaaacacgtaatgctttaaaggctatggcagaaaacggaaagggaattattatcgtcgcaagttacggtgtattttctaccggtatttctgtaaaaaacctgcatcatgtaattttagctcatccagttaaatcgaagattatcgttctccaaacaattggtcgtgttcttcgtaagcataaagataaatctttggctacagtgtgggatatcattgatgacctgggtgtaaagccgaaatcagccaatgctaaaaagaaatacacacatttaaactattgcttaaaacatgcattagagcgtattcaacgatatgctgatgaaaaatttaactacgtaatgaaaacggtaaatctatgattaaatttgaagatatttatgaagccacaattcgtgaggctactatcgataacttcatgagtaaaattaatgcttgccagaccttagatggtctggaagaactcgagaagtattacgataagcgctctaaagaaactactcttgctgattctgatgacatcattgtgcgtgatgctttggcggggcgtagacaggctcttgaagccgattctgaagatgaagatgacgaagacttctgatataaaaaagccccaaccgaaaggaaggggcaaagccaattggctacatcaacactagactaaattaaaagctgcgtttcttgtaattgctcttctgtgtcttcagtgacaggcaattcaatcgcataattatagcaagctccgggatgaaccgggcctttgtctgtgtggacaaccaatgcttcatcgattggtcctttacagacgacacataccgtattcgacatgattgtctccttagtttacaagtttatttattacgcgccagcttcaaactgacgaaggtcaataatgtgcttaatgctaaaacctcgtgacttgatagcatccatcgcatcgctacagaactccagtagaattccccaatattgcaatttagtatctacacccaagatttctttatcagcgcttaaaacagttttcatttctgatttttcatacacatccatgcatacttcaccaccaacctcgccacggccagtgtaataatccaatcgtgctttaagattttgctttttgagggcatctaatcttaacatctcttttcgacaagtcgagtgcttacgcacccatttaccatacagaacggggttattagccgcttcatactgtagtttagtctggtcgataatcaaatcattatccaattcatcctgtaattcttctaatctcattctatctccactctactgtttcttgggaaggactagtcccattatactctactgctagagttagcattactacgcatctgtatgcgtatacgttctagcgtatcagggtcgtctactatagaaaactgcacggtgacaattatagcattatcgtcatataacggaagcacatcaactgatagacggttaatcctaggctcataattacgcacggcagagactatattacgctttatcgtatcaccagttaatggagtcatgttttcaaataattcgtttgtgatatcacaaccaaacgctgggtcaaatggccgagacccctttcttgtggttattattccaagaaggctatttttaaccgatcgtgctcctaccgtttttgacacatcggtatcccaagcaagtcgcatctctgggtcaaggtcagaatataatttatcgatattgctcatgacataatcttaaagaattctttaagccccttaattacatgaatgtgagaaattccgcattcacaagtaatgggaactgccaattgaacctgcggcttcaatagcatatttttgatgttaactacatcttcggttgtaatagcagaatataaatcatcgatttctgcatcgtttaaatcattaaagtaaatctgctcatttccaactacgatatagtctatgcattttgatatcatcattggaatgtctgaatcgtcaaaaagattcggatacttgaactttattttaaatccctttaagtcataccagaggtcttctggaggatcgatctgcgcatgtgtataatttaatggcacaggaattttacgcccacaggtgcaattccaggtcacctcatgattaacctcgcctatactgtgcgcccaaagtataactataagtaattccgattcttgtttgtttaacccagtagcattggtgcattctctgagcaatgctttaacacattcatcgattgtaccgtttttcttcgctgcaattaaattagcgtattcttctagtgtaaaagctcggcactggatattcttgccatttattcttgtttcaaatttgtatgtgatgttcatatccactcctcttattcaaatatttataaatagtataaagaggattaccttatggccaacatagttagatgcgaattaccagatggtgtccaacgttttaagccatttaccgtagaagattatagagaccttttattggttagaaacgacatgaacaccaagtctgaagaagaccaaaaacagcttatagcagaattaatggatgattattttcatgaccatcctgtcgagtatcgtccttatatatttcttaaagtatttttgtcaagtattggtaaaactaaaataccagtcagaatgaagtgcccaaaatgcggaaaatataagcagtatctttttaatcttaatcagcctccgttgacaaatccgaaagtagaggttgcaggattaacgcttaagttcaaaaaacctatagaaataattgatgatacaggtaaaatgattttagacaacattatatctgtgaaggattcatctggggaataccagtggaatgaattaagcgatagtaataaattgacagttatcgatgctatagatgttgaaaccttggaaaagattttatcgcagatgaagccgtttaactttgagctaaagacgtcatgctgtgataccacgacagtattaaaatatgataacattgttgatatctttaagctattgctacatcctgacgagattttcacattttaccaaattaaccatagattggtttctcaaggtaaatatgacttgaattctataatgaagatgctgcctattgagcgtggcataaccttatcgcttattgaaaaggaccttaaatcatgacaacacaaagattaggatatcctaatataagcataaaattatattctggatatgatgcatggctagctaatagatttgttgaattagctgctacatttattacattaacaatgagagattcattacgcgggactaatgaaggattgcttcaattttatgacgcaaaaaacatgcacacgcgtatgaacggtgatgaactagttcaaatatctgttgcaaacagcaacacatcaagaacacaaacccgaatttatgggattaaacactttacagttggtgttgatgataaaggcgatagcattatcacccttcagcttggaacgctgcatgacataatgaatctcaagttcagtagagcgttttttagttctgcgtatgaaactataaaggaaatgataggcgcgatgtatgttgaccaaccgttgattgctcctcctatcaacggaatcaacgcctacgtcccacgggttccctggactagtaccctcaaagattacttacgatatgttagaaatgtaggcatttctacagacaacgatcaatttatttttgcgtgggaagacatcaccggaattaacatgatggattatgaatcaatgatatcccaggacccaaatgtattcatgttcggggctcctcaaacaataggtcagtttgctgcaggattaaaatatccattagcatgggattttgaatggcttgttaaatcaaatagatataatagaaatcccatgaaaaatgcaacattttatgcacactcatttgttgacaaagatgttacccgaattattaatggagaaggccaaaacagcgtattcattaatagatcaggcggatattctgacatgatttttaggaatggctatgaagaagcactacgcatttctacgatggctcaatatgacgggtatgctcaaactaagtgttacggtaattttgaactaactccaggaatgaaaatcaactttgttgatttaaaggaccagttcagaactgacttttatatagatgaagttatccatgaaatatcaaataacacatctataactaacttatatatgttcacaaacggctctgcccttgaacctgtagatttgattaaggtgaaaaatgaacttaaacgtgattcttcctattaagaaaatagtaataaatgaaaagacgatatcaattccaaaactggggttaaagcaccataatctgatgaaagatgttaagggtccagatgaaaacatgaatcttcttttggattcaatttgtccaggattaacagcagccgaatctgatattgttgtattacatttattagcatttaacaacagaataaaagaaactgttgttaaagatgattttacctacgatttgaataaggtttacatttgccagcgattaactcaaaggttagatggtaaagaattcaaattcagagctcctcctcgttattccaaactaggttcagtagattcaattttgagcgaatttcttgaatcagtagatggaaaaccaatggatataaactttatgaagcttccagcttttgtaacaaagtgggctgatgacttagtaaacactatagccattgatggacctgaaggaccaatcaaaggcatgcttaacgtaatggaaatatttgaatgactaagaaatcagaaatgaattcaatgcgtagaagagttattgctgactcggctccacagaaaaaggctgagtctcaagctgatgctcaaattaatacgctagaagatattggtcgtcgtttagacgaccaacaagcatctactgatttaatttcggatgtaatagaaactaaatcaaacgaaattatcaaatcagtagaagatgtttcagctggtgtcgaattgaccgcagaagcttctgagcgcacaactgatgcagtatcaaaacttaatgatactgcatcattaattaatgataagctcacgaaacttgccgacttgttatctaaaaagcatgatgttcagcaagatgtccaaaagactggtactggaacatcattagaaacgataacagaacaagtcccggatgctcctactcagcagccgctagaggaattactcgaaagacttattcctcctcaggatggcagacgtcctgacgcggatttctttcctagcacagaagagcaagaggaaaaagctgagcctaaaaaggaaactgaggacaagaataaaaagtttcttgacctaaaatttggagaattaattaaaagcgttaaatctggttttggaaaaactatttcattaacagataaaattagcagtatgctgtttagttatactgttagcgctttggcccaaatggcgaaaactgccgcgatggttttgggcgtgataatgcttatagatttaattaaagttcattttaattattggactaaattattcgaaaagaactttgttgaatttaacaagcaagccaaagaatggggtccgctattaacagcaataagcgagatgtcgaatgaaatagtaaaatcattcgtcaagggagattggggcggattagctaaagccataggttctggcttggttgatgtaattgacaagctcggagaaactattatgctcggaatgagtaagcttcttgctggaatgttacgcgcattaggatttaacgattcggcagataacattgaaggcgctgctttagacagatttcaaactgttactggagcagaactcgatgaagaagatgctaaaatgagagcaaaatatgttgaccgtcaagaaagagaatatgacgaacaacctgaatggaaaagaaagctttctgctaagttccaaaaattcaccggtcagattgatgacgatgaatataacaaactgctgagcggagagaaaaagcagtcagcgtatgcagacttgccagaagaagaacgcctcaaaatcatcacagctcgtaataatgctgaagcagaaatgaagagaacaaaagcgtatgtagaaaaaactgacgcatctgattccactcgattagactctgctaaggatgcagtacaaagcacaaccaccagatataaagaattggagaaattatctccagaagttgcaaaagatttaaaggttgaattagaccaattgcaaaagcttcttgattctaaaatatcagaacctgctccaactgccgaagctatacctgcagcagaacaacctgaggttaaacagtctgcttctattaaagccgccgcggatagtcgtgaagctgctcgtacacgtgaatctaatacacagtcacaacctatccaggttaatactgctgtaaataagaatagcacacatgtttatagaatgcctccacagacttcgacagctgctcctggaatgcaaggcgctatgaaaacctcttaaggaaaaataatgattttcgaagaactggccgatggccttgaaaacatcaaaaaatcaggaactcgaatttcccaaggtaaatctaaactgacgaatgcgccaaccactaaggtggcgcagttcccagctgaacgttcagctgggaatgattccgcccaagatatgagagtacatgacttatatcgcaatgggttattattcacagcatatgattttaaaggaagaactactcctgatttgcgttcatttagacgagatgtaatgttatcgtctgtattcgattcaccaatgtcagcaatggctaattcatcaagctctaccactagtactgcaccagtagctaatattctattaccgcggtctaagtcagacgttgattcagttagccataaatttaatgatgttggggattctcttgttacacgtggcggcggtactgctaccggtgtattaagcaacgtggcttctactgcggtgtttgggtcgatagagtctttaacgcagggattaatggccgataatggtgaacaaatttataacactgcccgtagtatgtatgccggacctgataatagaacgaaagtgtttacttgggatttaactcctaggtctgcagatgaccttatacaaattattcgcatctatgaaatttttaactactattcttacggtgtgactggaaattcatcatacgcaaaagaagttaaagctgctattgatgaatggtataaaggaactcttaaatccgcagctccagatggggctaaagtagaaaacactgtgtttgagcaaataacatcgtttttaagcaatgttattgtagtttctaacccaacgatttggactgttcgtaattttggatattctacatcaatggatggtagagaggatatatttggtccatgccaaattcagagtatccgctttgataaaacgccgaacggacatttcaatggtttagcaattgctcctaaccttccaagcacatttacgcttgaaattactatgcgtgaaatacttactcttaatagaggtaacgtttatatcggaggtattgaataatgtttactctcgaagaatttaagagtcaagctgctgatatcgatttccagagaactaatatgttctctgttgtattcgctactgtaccctctagtaaaacccaggctcttctaaacgactttggcggagagctgtataataatatgggtttagatggaaattggcttggattgaccccaggtgaattcaatcagggtataacaaccatagtgacacaaggaactcgacaggttgttcgcaaatcaggtgtgaatacattcatgattggcgcaatgactcaacgcgttgtacagtcgttgttaggtgaattcacagtaggtacttatctgcttgatttctttaacatggcatttccgacagcaggcttgatggtgtattctgctaaaataccagagaatagactgtcatatgaaatggataagttccataacgctcctaatataaaaatcactggaagagatatggagccgttggttctttcatttaggatggacccagaagcaagcaactatagagcaatgcaagattgggtaaatgcagttgaagacccggtgactggtctgcgaggattgccacaagacgtagaatgtgatatccaagttaaccttcatgctagaaatggattaccacatactgtatgcctgttctcaggggctatgcctgtagcatgtggagctcccgaatttacttacgatggagaaaacacaatagctgtgtttgatgtcacgtttgcttaccgtagcatgcaaacaggttcagttggaaaacaagccgcaatggattggttagaagataaaactattcagaaaattgagacgattaatccaaatcagggcttgagtgcgtctgcttcaagattgtctcgtttaggcggggctggtggtggaatttctaatatcactactacaacaagtagaataatttaggggccgtaaggcccctttgttttatgcaatgcagccaataaaccctggctcagtacgaagaagtttcatttcttcagtagtccaaactactttaacaggaataataccttctgctttaccgtttagaaccgcttcaacaaacgatggttcagttggcttacggaagatatcttgaataagaaccgtcggagtaccttcgttaaacccttcaagcatgataagaacttcttcattgaacttctctgcatctttaacatcagcagaccattcaataccgttaaagcggaatacgtgtttcatatcaatttcctcattggtttgtgtaagtctatagtatcacgtccttgtgataagtaaacaactttatgcaagtttttctgggataccatccaggttgatagcaccagccagtagctccatggtgcgtgtgtagctaaccttatctgtggaacggtctggcgaaaagtaaatctcatttaaaaagcctttgaacttgctttcttcaagaggttccactttgccctgttccatcaagatgtcaccatcatagagatgaaccgattcatcgatttgctctggcggaactaccgtcatttctaccatgaatgtcttgttattcgctacaccaactccatttctaaaaggagttccccatactttgttgactttcattgccaacccgcgaggaagaataacttcagcctcatcgctaaagcttgacaagacacccgggataactaccttaactttatcggccccatggataacgaatccaaacttaaactcatcgccataggcaacttcctcgcctctatcaactctttccaagttgtctgttccaataacagaagatactgcatctatagttgtttctttgttttctaaatcagaactaggtgcgtctggcattaatgaatcaccagcatttgaataagcaccaaagataattggacttaacgaagtagaaacatagttctggaaataaaacattttagactcaatgttatctttaaagtcttcatattttcctcgctgaccacgatacaaaagagtgcctggttcaagacgcaaacctttttcaaaggcagaatcgagcggacgaattttcttgtcaataattggatcgcctaagctttccatgccaataagatagttattaacaaatgaataaccagaaccacagtaatggtgtattgcatctctttcttcttcgcttaaacgagaatgcatttcacggttatattcaattgctttggatatagaatcgccaacaattgacacataagcggatatcatataattgacaagattttggtattgacgtaaagctccgaaatcgtcagctggaggcatatcaaatccacgagtagctacttcaacgattttacgcattgtttccatagatgcaggatttttagcttgagcaataacgtcagcaacgtctgaaattcgttgttcagcgattttcattttgtctgaccccgaaggaatgaaaaccttccagtcgtcatgcattctcgacatttggcctacaaataatctctcaactgcatcgccaaaattacttccatatccgccacgaacacgatagtgcttgatatcatcaacataaaaaggaattgatttttctaatccggctttgatatctttttggaggtctaccgtatcgccttctgcgtttagtactggagtgttagtagttaattcgtaccagcgttcacgtttattttctggccaatcttcatcaacatatgaaacaaatttgccgtactgtgctcggattaaatcttttcgagacactttcattttactcattacagcgagttcagatttcttgtcttctttttcgccaatggaattagccaatgcttcggctttggtaacgctttcgccggtttctttagacacataaatttcacctactttggaatctactttggtgtaaagttcttctgaaatttcaggaattccttcaatctcttcaagtttcttacctttacgaaccataatagaataagcatacttacctttgtagtaagccatatctttcattagattgaaacgaccaccggtgcgagtagtaatcaaccgagcaagaatgcgttgaatagctttatcctgtccttgcattttcttcggattaaagcggaacattactgcatcggctttaatttgtttaactactttgttgacagtttcaaagatggtattgattgcgccaatcgggtcatgacctaagccacccttaagagcaccaatgttacctttttctgacacagagaacacataaacctgaatgaatttatcacccattttgatattcttaactgcatcaccttgacctgacccgtgtactaagcgaatcattaaattgttattacccggtaccttaatcaaaaagacctgtggtaccttaagttttggcttaacgttctcgacaggatagattttactattctcttcatcgaaaacttcatttaaaagttccatgacatatcctcgttagtttattctatttatacgaaaaaaggcccgaaggccttaattaattattgttactgtacgccaaacttgtagtccatttacagactcatacgcttcgatgttttctttgaagtttcttaatgtattaatgttattaaactcaagaacttcggtgtgaacagaaatacctccacgcccatcagcagttttagcaattacttcatatagaactttcattttattcctgttgcctcagtaaagttaacaccaaacgcggcttcgaatgtattagccacttctttatcatatctacgctgtttaatgataggtaagaataatcctactgtaccatcatcacggccttcagcagttacccaaccattgcattcaagttcccagatagttcctggaagagaatctctaattttccatagatgagtacggtcaagctcgtgcagttcttcgggcttatctttaagacctgacccagcgttaacacgaatacgaccacattctgatacgaacattaagccgcccattttaccaggttgtttcctatgctcgtatgaaccgacacatttcaaatctacggtgataacctctttaaatttgacgaggttcttagaacgcttatcttcccaataagcaccgatattcttaaggataataccttcgagaccttggtctacgtatgtcttatagatagctcgagcttcatggatgttatgtacgacatggttttcaattagaataaccttgtcatagcctttgctcatcatttccaatgcacggaagcgtacatcataagcaaatccaggaactttaccttcggaatatactacatcaagcggaacataatcccaaacttggaatctcataccttccgcttcttcggcagatattgttcctttaatagccttattagccaatccgtttgattccgtgcgagccgtctgttggaattccttagctttacttaactcaggaagctcaggctctttaaacatatcaaacaggtcgttttcttcttctttcacttcgacatgatataccaactcgccgtcaatcatcacaccgttaggatggcgttctcgggcttctttggtcatctcgataagttgacgcttaagtttatctagacccaggtattcattaccggaacgagtaagaagagtcacatcatctaaatcatctccgcggatttcagcgaagcatcgggctccatcagctttaagttgtgcgaatgcagggaacttaatatatgacagcgctttctcagagtaggctgatgctaacatctgtggcatctcaggaattaatttcttccataccttattagcaatagaacctgaagcgccgcaacgcatatctttaagaagaacccgtaccagtacactagcatcaccctcattcatcttagagagcaaatctactagcccctggattgccatattaccagtaagtactcgtgctgccagaatgtcttggaggtaatctagaccatctgaaaacgtctttgaaggaacatttggatatttaacgggagtatattctggaactttcttaataaagaatttaaatcgcccggaatacgccagcagataagctcgctttaaatcaacgttatctttattgtcaatgagaatttgggttttggctttagaacccttagcatcttcaattgctttgatgatatcaaaaatcattattcacctaattcttttgaaagttcgcttacgctacgatgataagttaatccatcgatataaacaaacccgttattgatgcattcattccaaatcgggcacgactttgcttcacgccaaattggattccaacgataaaactgattaacatgaccgtaatcacatgataaccagcgtttaccaaccttagtatgaactacaaacatatttcctcctagggtatggcaattataccatacccagagtgttagcaattaatttggtgattatcacatgtaatacgaccattattccaccagtcgtttccaggaggaacatgtggaccaggactaaacggaatgataggttgtttccaccaatctcctggaacttgccgtggaggccaattaaaaggatgttgctctttacgaatttggtctttgatagcttcttcccacaatccagaaagagacttctgaggtttcttaacggatttcagagattccaggcaagttacaatttgatgccaatcttcaaccataattccaggagcagtcactgaaccttctcgctcaccacgaggcatataaaacacacgagtttcagtgtcttcaaatactttgctggccgcagcaatatgtttaggcaaatcatctacatagcagacgatgcgatcgccgtattttactttagccttttccagtaaagcatctttagattcatcataatcgcagaccatgatttctgtaaatgcatcagggaacaaagcattcagattgaaacgacgattaaggttagcatctactgaattaccaagagccgtgatagcgacaaaatcgtatttttctttgagcttattaactgtagctaaagcatcagcatacggagcaagataacgaataaaatcgctgttgttgtacttcagaagcagcttaacagctagttcttcttcacaatcaaacagctcagcgggtttaatgaatttttcagtagtcatcatatcaaggatatgctctaccggaaggttatatttttgggcaaagtaaggcagaccactttgccacttaacgatgattccatcaacatcggttgcgattactggctttgacattcggggaaattcctcaatgcttgtttaaatttggcaacgctatttgcggcaccggtgaaattgaaccagattaaccctggagcgtccgagggttctatatcaattaattctatattataatactcagcagtctttagcatttccctggtgatacgtcgggcaaccatatgaccgaagtgaggattaatagacatcgtcgttagcagcccttaattgagtaattggataaagctcagattctgcatggattgaacgattaccatcaacccaattaacttcataccaaggttcaaccgagtaggctttaatggctggagccgtatcacatacaactccaggaattccatttgctaatcttactgtactgaagatatgatatttcatgcatcaagtctcactgcccattcaggcaattcaaagaaatccggagcatcaatttcatactcaacggtgtgttgtttaacgttagctgacatgatatcaaccatttggtggtttttcaaactgcaagaaaaaataccagctttagatttaggcacggatacaatcatgttaatttcctcaaaatttagttatgaatttttctttcggcattttggcatttgagccatcactgtcagaatacccaattggcatagttgcattaatgaattcaattttagcatttataacattaatgctcagagaatctacgccatcaaccatacgaaattcaggagggcaatacctatcaatgtatgctttcacaccatttttattagcaggtgtaccatcgcgagtatcgctgataatggtttcaacttttttctttcgtgaatcatagaaagctgatacaatcatttcaatttcctcttaaaacggacgaatattaacgtgaactacagggatagcaaaaggctgcatgattacaacttttgtgtctttagttgcattcaggcgttgtacttttgcaagattaacagcttcttcctttgttaatccgccattgtaggtatcatttcctttatttgaggtccaaacaccccaatcattgcttccatcatcgtcggtcttcggttcatgttctttgtagatggtttcttcaaaataatgctgaaactcttgattagtaagaatacaccacatgtgagaaaagcgaacttcatctacactaacgcgtttatattccccatctggcttaatgatttcaaattcaactaatccggtattttccgcatatttaaaggttctggtaattttaatcgggttattaccgatttgctcaaaaacacccttgataagagcgcctggagacaagattggagtctttttaagcttatagaatttacctttttccattatcatttcctcaatagtggggccgaagccccgagttagttaaaacttgatttcgtttgaaacgatatcccagattgcttcacgttgttcttcggttgttttacgaccgaggatgtggcgcagataaattttaacaagcagctgacgatttgtgttccaagacggatgtgaagataaatcacgtttacgaacttcatcatggaatccaactttgatttcagaaccgttgaactgaatatccaaagtaggaccattttcaaagctgaagaatacgtagttatcttcccagtacatatcgatttgagctactgtgccattgttgtgttcccacagcaaagtagtagaaacgtcccaagcattgttctgtacgtatttgcggttgaagttagtgaagttcatttttattctccgtagtttgtttatctgtttgggtggtacaggtctatagtaacccagaccacccaagaagtaaacaacttttattcaaaaacttcagacatttttaacctctacagttttaacagtttttacttctgcaaatccgatgcttttaaacagttcatacttggtagtttctggaacgatatcggttagctcaaggatgatttcttttgcttcctttaaagcgaagacgctacgcccgtctttaaccactggagtaggtttaacgaacgttgatgggatttcaaaaactgcatagcggtcatcagagctttgattttcaaacgctcctatttgcacaacccgtccttcttctaactcgtgagaagaaaataagcatgacagagaccggtcatattcatctcctatggtttttgccgaaatgattttaccagtttcggttttaatcttaacaacccggcccagcgaatcaagttctaacggcgtccagccttgaactccaacaacagtggcaatgagatagttaattgtgttcttagcgtctttccatctacggtaagtttctggggaaatgcaatatactcggttttcgctgtaattcattttgatatcctcaaagatggggccgaagccccgttcaattaacagataaaagtccagtgagttaaatcaacaacacctttagctttcattttttcaattaggtcgtcagccacttgacgaccgttttcataccaagttacatcttctgagtaaccatcttcttcatctgtgtaagtttcagaacgaatacgaccaacaactggagtgttcagaacatatacataacctgtgaaccaattagttaacgttatatgccagaagaaatcatctgatggaccgtccggtgtcatgcatggaacgatatcaccttgaactttagacagaatccacattttctcgtggacagtctgagctttataaccgtcatggtctttagtcttgatagttgcattcaggttgatggtattcattttattctccaatggtttatctgtttgggtggtacaggtctatagtaaccttgttgagccaagaagtaaacaacttttttcattctgcggaaaataaaaaagggactcccgaaggagtccctgaacttatgctttcggcttaccaaaacgagaagcatcatcgcgaagaaccgcacgagcccgacgcatgattttctcaaccgtctgattgatacgcttgttcgacccacgcttgtagccagcgcgtttagaggtaccaacaacttcttttactgcagtttttgctttagcctgtttagccattttatcatcttccattttggagaaatacatgggagcacgttcttccgaggttcaacttctttcgacagttctttcggttgtagctcccgcaagccctcaaagggggtactatttaaactcttatctgttgcacaccgttagcttaaaggttccgggtccgatttatcggggataagatatacaccgatggatgtataggccttgaggcgtactcccgattggccatcgcctcggggtagcatgcacttgccgtttattttctagctgcactttggtagcaaatcaccgttggtttcgggtgttttacgtggggataaccaacaacgtccacatcatacgttacccatgcgtacacatggtgggcgtacaaattacttcagcgttaccacaaagtggcgaacagctttgcgagcagcagaaccaagatgcttagcatacttcagttcgtccatcgcttctaaagtatcacgaaattcagcttgtgctgggttcaggtgtttaaaccctttcagaacttccagtgcttctgcatagatatcgattgaagcaccgtagttttcgtgaccggaattccatgcattacgttggagttccagagctttagtaagttgtttgttcattgaatcgttcctcaaatgaggttaaaatttggtggacggtaaccgaggtttagctcgggcatccaccgcgtagaattgctcgggtaactaattgtccgacgcccaattcatattattatttatatacgcatgcaagggacttataatgacaagtcacaaacttctgccggatttctttaggtttcttcacacctgctgctactaacggatgaggtacatttctgatattaccaacaggcagtggagtcaaatcaccgacttcaacaaatcctttcggtacatcatcaccgatagaatagatttcacacatatccggcagttgtccttgttcttcttttccaagaataataccggaaggagaaacaatttcatcaccttgctgtgcaggttcagatacgagaattacatactcgcctagagctttaattggaagttccatgtgttacctttattgtttgaccatgtagttatattaacatggtcagtttaaagcaaattacttaccgatcatctgcagcagatgctcaactttcataccatttaccgagatcagtttatcaaaggcaaatgagcgccaaccttctttctcggtatcatatactggaagtgaagtagtgctttctgctcgagcagatttagtagtgctttctaccaaatcagatggaataacatctttatcacgagtacagcgcagagtacgaatagtgccatcagctttttcaaacacaatctgggattcgcccatgctcagcacagccttcagagtttcacgaatatggatgttttgttcagtagtcagtttcattttgatgtctctttaatagttttgataattacagatttgcgcttggataattcttttaataatcgaactgcttgatcttcaaatttaaatgttgctaatggtttccatttaaaccaataccggcgttctactgagtatgatataacaacatcaccacttaggttaagtttattaatttcaacaattctaagtttcattattcaattccacagaattctttaatgttataccaattcaacttatccaaattacgttttggaacattgaacacctcaattccagcagagcgaagaatatcgtcccaaccgggttcgttcttgtcgtatgtttcgcagtatactaattttttaataccagactgagcgatggcttttgcacaatctggacatggagacagtgtgacatacattgttgctccatcaatactactgccgttccgggcagcaaaaagaatagcattaagctcagcatggatttcattgactttagaccatgcagagtgggctgctcgatgttctttgagcaatccgacttttttgacttgaaatccgtcttgacgcaatcccgtagatttgtaaggaatttcaccaatccaaccttgttctgctgcatggtcacaacagttcacgccgccagaaggtgaaccgttatagccagtagaaataattcgtccgttcttttcaattactgcgccgactttccacgagcagcattttgactcttgagatacgagatacgcaatttgtagtactgtcgacgctttcatttaaatcaccagataagttgtgttatttgttttaaccaattttaactcgtcggtaggagaagcaaaactctctactcgagaagtacgaatgcctgtaccatctggaaacggatgatttcctcgttcaagaacatcggaaaagacataaccataaagaggttggccttccttaacatcaacgttactgtacaaaatagcatcatattcttcgcgtggaattgaccaaacgccttggtcagaaccaataacagcattaattagacgaataccattttggctaatttctgccctaattccacgagcatgttcaattaaaagagcttctaccgcttcacgtaaagtcattagatatgtcctaaaatgttagtcatttcaacttggcctgttccggttaaagccaattgagtatgttgattgctctttccattattaactgtaatgatataagcatcaacatagttaaaggatgactctcgtcggagagtcactttacttccaggaacccggtttgctacttcctgtgcgaagattttaaccttcgaaataaattcatcatgtgaaaatttagcgtcagacaacataagtctcaacctgttgggtttcaaaattagcaataattccaacgataaaccagtcgtgttcaccttcgccacaagaaattttaacttcagatgaaccgcctgaccggtcaatagaaaatttaataacttcgccgtttggaataagtgcattcattgcagataaaaactctgcatgcattttggctacttcagatggagtaaactcatctgttaaatgattagcaacaacttgcgtaaatgatacttttactacttcggaatactttggaaacattatactttcctctaaaaatcaccgtgggctacttgccagcattcaacaccgatacgacgccacatttcaaccacctgcgccctgtcatctactgcaagttttacattataacgatcagcaattcggtcccagaagatttcttcttttaccacatcgtctttgcgtgaatcgccttgcttacgttggaagtgttcgcctgtttcgccaacatggtccaacaaccatttcttcgtaatgcgttgataaacagtagggtcttctttagttccagactctctaccagaaacagtaagaattttatatcctttattacgaagcattttcaggaattcaattaccatttcctttggatggtctttaccacatttggccaagtcataaggagaacgatgattgttatctgctaacgtgccgtcaaggtcaaagataactgcttttggcaatgattcgtctggaatatacaaatcatatgggtgcatcttagaatagaagctacgaagcacttcaataggaactgcattcgcgccacgatagaggttacgattaagcaattcagtccaaggaacgtcaaagcgtttaatttcccacttgacaccatcaatttcgtatgccaactcttgccacttcttgatagtcgttggattaaggttagtatcagcaatgatgacgcctttagttgtttccatctcgagtaaggtcttcgccatagaaaactggcatacagatacagacttctcacgaagcttagagtatttgtagtcatttcgtttatcaaggccaaagataccttcacgcaaatcatcacgagataaaacataccaaccggggttagctgctacatattcattagcccaggttgttttaccagagcctggagctccttgtgtcaaaaccaattttttcattatgcatccttaagagtgtcaataaaatcatgaagagccttagacttttcattccaattagcacgatatttttctttaattgctcgcaatggcttattcatcgacagtatatcatttttgtcataattttcagctgcgcgtccaaacacgatgcacgctaattcattttcagcaattaaccctttaagtgtttcatactgttcttggttcactacatcaccattttagaaagattgcgatgcgccaatgagcgacgctttccatgtttcttcaaaaaattgttaacttcatcttgctctacaccgccactttctacaaattggagtgccttaccgaattcaattgaggcatcttccaattcagaaattgcttccttcagtgcctctttacgctgaacaaactccaaaaaatcgggatacataaattctgccatgaatagtttaaaccacacatcaaatgaaattcgtgtttggtcattaagctcaaacactctttcttttaaagctccaggcacactaacacggactgtataaacatatccattagaaatattttctggtacagcaatagctttcttaacaagaggagttaactgacacgacccaacagctagcatattcctaagttgtgcctttttaatcgataaaagatgcgatgcgtcttttacgaagtaagaatgaaggtgtgacggttccataatattttcctcttatttagtttacttaacgcaacgaggttctttaaggtcagaacgatagtaacatatcattccgttagcatctttagtataacgtaaaatatcattcatccagatgcgatactcttgcgactcttcaaacggcataccaacccaggctttaccgtcaattacttttacttcccaatgtccttcccatttttgaattgggtctggccaatcaggatgcaaaaccgggacatccggtgcactagaagaacatccaacaagtaggctgataatacccatggctaatagacttcgtttcatctggtagcctcctggatatcttctgcaaacttattgaagcttgcgttaatctgtttttcaactaacccaggtttagctgcaactacgtttccacgcttagaatctttattcatcttagcgttagaagtatcacgagctgctcggttttcctgatagcctttatatgttgtctgcagattttttatagaaacaccgatattttctatttcttttgcttgtcgatcagattcgtcttggacgactttgaggtcagctttaagattttctacccgccacgaaagatatttcaatccaccggcggataacgctaacacaccaatcaacagccaagttgtgtttattttgagcatagtttaaggataacctctacgatatcatcacgggataatcccgaaatgaggatgtgacgatcagaactttccgaaggagaacacttgaagcaagcttctacatattctgccatctcagaataattcagctcgcgatgcataatgccaagacgatgcttgccataaatcgggtcaacgattacataacatttgcatccgttggcatgaacgtttggctgggtgatgttcttgaacacctctgcaccatacttcgcgagatgattatctaggaaatcaatcatttcatctacggcttcaggaagggcttcggcacgctgctcgttcacacgattagtgtactctttttgcttcttacgagcagcttccttgcgcgccatgtgtgtccgtaggtcagtgacgaaccccaccttcttggtgccattccacacaaaaattccatcggaatgagtaccatatttgttaacaaccatatctaaagtaattgcttgcatatccatttcaatatcctcattggtttgtgtaagtctatagtatcacactctgatgaggatgtaaacaactattcttcagaaatttcaatttctttttcgtactcttttggaacatatcctgcccagtacttcaagaacaccctttcgaggtctttaagcagtttatctacatctacagttccttcgtacatgttcatgataacaccaaacaaatgacgctgattaaccgtggctttctgcgcagcaatagcataatctttacgagcacgacctctgtattcatcatagaatgactgacacagctcaagtgactttccgaggtaatctagataagcttgctcaaacgcagaaattttcttaattgcgtattcatctccagcaaaaagagaacgcaaatcgtcggaatttgcagatacgacagacgcaaacagtctttcatttgacgttattgagtctttagtgtgatgaagagcagaataccattcggttttaaccttaaatctctgcccagtgtttagaactgcaatgtacccttctacgccttcaagttcacgaacaccttcaacccaagttttgggggcagaaattccgtaagcattaattaaataaggacgaatcttagcattagcgtacaaatcatcatatttaatatactcgccagttgcgttattacggacgtttaacacaaacagctgtggctcctgatatgctaaaacaacacgattattaggtgaaacaaattccatgtttaccgtataaccatctagcgctagctcaagaataacctgatgaagcgaagaatattcttcactgttaagcaaagctgaagcttgtcttgcctggtcactgtaaagagaggtttttgatttaaggtatagatacccatcatcaacataagatgatactagagagccatcagccttatccataatgtattctacatcgctaatatcaattcccatcgttagtgggttttcattcaaattgaagaatttttccatcggacgcgaagcaattcgaattggggtatcgccatccatctcaaacatgataccacggcattcgagagcatcgggttttaaccactcgctgtagcttgcgtagtgatatgaaaacactctgaacttaccatccataggaccggtaaaatctttataaaagaattttgcaacttctgagctttcacacagattcattaaatttttatatagctctaacatttctttaccttatgtttgcaattatcgtagtgccatctgatagcaatggcctttgaagttattataccacaatgcgggcatggactgtacaaaggctttttctttcctttttggctttctgaccgcttgagtttagtttcttcagattgtgttttaccggttaaagattttgatatcttttcgcgtgtttctttggcatgagtctttccttgagttggacttactctgcctttcagtgctttagataaattctttctatgttcttccgttcgtttctttccggagaataagttagatgtataattagaatgctttattctagagctttcataaaatctggaatgaactttaaaattctttccagaagaattacacatcatccaaagagcataattcattttagaattattatgtatctttgataatagcaaatgggcaatgaaatgttcacgtccagtcaataaaactaaattagaaacatcgtcatttcctcctaatgattttggaatgatatgatgagcttcagtataatagtttaattttcctttatcattgcctcgtaatttaccctttgctattaggttatcatatactttaacatagttcatttagctttgttagtatgttgtgtgttccatggaggattgaacttcttaatcagaagtggttcttccaagtccatagtggatattgacatctcgccaagttcattattaatcaaaagattaaaacactgacgagcatagaactctacttttttgccagccattagtgcttcaaaaatcttggcagatttagccgaatcagaggtttggtctttccgattaatagcagttctataataatttatacgtttacgaagattttttgtcttaccaatgtaaacaagctcatcatcaactgcgatggcataaactacattcaacttgtttgctatcaaaattggtttgatggtaaaatctggttctaactcaagttgaacatattttataaaagaaaactcgttagcaatatcattcataataaagaggggccgaagcccctttccttataagtactttttaaatccaattagaacatcatcagtgacatcattgtcaatctgagctaccagataagaacttatctcaacttcctgaggagcagattggactgcatcagagttaagatattcgcgaatccaaggaataggatgacgagttggtgcatcagtgattgggcacggcagcccacagctacgcatgcgagatacagtcagatagtcaatgaagtcatgaagaattttaacgttcagtcccggaagaccaccgttgcggaaaagatggatagcccaatctttttcttgacggttaacttccatgaagattttaattgcttcttgttcacactctttagcaatctcaacccattcttcgccatcagtgccagtttgaagttgacgcagaatgtactgtgtgcccttcagatgaagttgttcatcacgagcaatgaacttcatgattttagcattaccttccatgatttccatatttttatggaagttgaaggtacatgcaaaactaacatagaaacgaatagcttctaatgcgttaataacgtgtaagcaaagataaagagatttcatcaaatcacgtttagcttctttaatttcgatattatcttgattaaagcagcgatttttggcattttcccatgcgcgagtcttcgctataacatcatcatagtaaacaccaattgactcagcgcgtttcatgattgcttcgtcaagaacgatttcatcaaagattttagctgggtctacatataggttacgcatgatatgcgtgtatgaacggctgtgaatagtttcactgaacgtccaagtctggttccaagtatctagacttgggtcagaaataagtgcagataaaactgctgctggagcccgtccttgaattgaatcaagaagagattggtacttcaagttatcagtgaagatattgcgttgatgttctgggagtttttcaaactgaccacggtccatcataacgttaacttcttcaggacgccagaagaaactcaactgcttctcaatgagttcctcgaatactttatgacgctgaatatcatagcgtgcaattcctagaccagaaccaaagaacattggctcggtcatgatatctacttgcttggtattaaaaactgtactcattctatttcctattctgtggtgttaaccatccgtggtctaattataattcccttttattaaagcttacaggccgcgcagtcagcagagtcttgaatcatatcatcgttaccggaaccatcacgggtgttatgatagtaaagagtcttaccgccaaagtaccagaaataaagcaagtcgtccatcattaccgacatttcaacttttcctttagggaaatttgccgggtcgtaataagtattagcagagatgctttggtcaacaaatttctgcataatcagaacctggttcagataaggcttattaccctgtttcgcgagctgccaggcataatcataaagggaagcattgtgttcaacatttggaacgacttggttgaagcttccttcttttgattctttaactgacactggtccacgtggtggttcaataccgttggtagagtttgatacctggctagacgattcgcatggcataagcgcagataacgttgaatttcggataccgtatcgcttgaggtcttctcgcaggagttcccagtcacagacatagtttggagctgcgagttggtcaattctttcgttgtaccagtcaataggcagttcaccacgtccgtatcgtgtttctttgtaaagcgtgcatggacctttttcgctagcaagtttaacagaggctttgatgagtgcatattgaatacgttccatcatttcatgagtaatatcattagcatctgcgtatgaagcaaagttgcttgctaaccaagctgcatagttagtaatgccaacacctagtgctcgacggtctttagcttttaacgctttgtctactggataatcttggtaatccaaaaggttatccagggcccttaccattacttctgcgatttcgttaacttcttcttggtcttgccagttgaagttgtcgagtacgaatgctgcgagtgtgcatagcgcgatttcgccatcttcttggccaacatccgaagttggtaacgcaatttcgaggcagaggtttgattgcttaaccgtagccacatcacgaataaaaggaccatattcaccaacgttatctaccatgtacgggtaaattcgagcagtaccagcacgttcagtaaggaacaactcaaacagttcacgagctttaatacgtttctttcttatatctgggttcttttccagttcttcatataatgtacggaacgcttgagcatcacggaagtattctgtgtacagcgtgccaagacatacatcgggactgaacaatgtgatgtaatcattcttaatcaagcgttcaatcattaggttattaatctgaacaccataatctaaatgacgaatacggttttcatctacacctttgttgttcttaagtacgaggaggttttcaacttccaagtgccagattggatagtacagtgtcgccgcgccaccacggactccaccttgggagcaggatttaactgctgtttggaagtgcttccagaaaggaataactccagtatgtttgacttcaccgaatccaatttttgaaccttctgcgcgaatcattccagcattaataccaatacctgcacgcttactgatgtatttcgtaattgatgcagcagcttcgttaattgaattaagactatcaccaccttcaataaccacgcatgaactaaactgacgtgtcggagtacgaacaccagacataattggtgttggcaatgaaatctttttagtagaaactgcatcatagaaacgaataacgtttgctaaacgattttcgccatcatcttggtgcaagcacataccgatcagcataaaggcaaactgtggagtttcatacaattcaccagtgtgacggtcttttacgagatacttctcgataagctgcattgttccagcataagtcatagtgaaatcacgctcatgcttaatataagaatcaagcaaagtaatttcttctgcagaccatttgctcagaatttctttatcgtacttatttgcgttaacacaacgtgaaatgtggtcaataaaagcaggcggttcaaactgtccataaacacgtttacggatttcaaacattgctgcattggatgctacatattgataatctggctcatcgatagaaatgctattcgccgctaccttaacgatagtcttctggatatctgcagtgctcataccatcacgcagatgggatttaataatttcatacaactcgtatgggtctactttagttccttcgcacgcccattcgaggactttaatgattttctgcatgtcaaattcttgactaacacctgagctcttaattacttgcataagtcctctaattcaaatgtatctttaaaaagtttattcactacaagagctattatatcaccatggcaaggaagcggtttgcaggtgcatcctaatctcattcctcttaaagtttctaagtgctctcgctttatttctccgttccgaatcttagcaataaaatcgtccttaaatgccgcaatagcatcaggacgattatcgcaatctttaccgacgtaatttccccacattgttccacgttggatatttacatcgaagtcggaatggtatttattaaccacccgacatatcttcatgttatatcaacttcaaaccagcagattaattgtgttttgcctatagaccattcatatgatttaatgacagataaaacgcgttgttcggtcccgtcaaaaactatcttgtcattaacttcaggcaaatcactagagaatgcatcatacatttctcctaatacagttttagactgatgtcctttacgaacaaaccgaatattcatacagccattttccccttaattgttgggtgagattcatatccaactaattcaaagtggtgtggacgtgcaaattgttctaaccaacgaacctgagaactagtctgccatgtttcatacgtatccggaaatgctattttaagttcgcataactctttaggttctcggcggagaatttctttgcattgctcaatgtgattcatgtagatgtgagtattaccaccagtgaataccaaatgaccaggtttaagattggtcattttagcaataacatgaatcaatgcagcatacgaagcaatattaaacggaagacccaagaacacatcaacagaacgctgataccactgaaggtctaaatatccattgcgaacgttgaactgatacatcatatgacacggtggcaatgccatccggttcaaatcaactgggttccaagcagtcacaatctggcggcgatcagttggcaattgcttaatacgatcaataaccaattttagttggtcaacacccatgaaatctcgccactgtttgccatacaccggacctagttcaccaccagaatatcccatgtcttttgcctggttttcatagttgtcgtcccagacagttttaccttctagcaatgaaccatgctgaataagacgcaattcatgcacattagtagacccacgcaagaaccaaatcagctctgcaatgcatgctttccatgcaagacgcttagtagttacagcaggaaatcctttttgcaaatcaaaccgaatctgggtaccaaactttgctatagtacctgtcccagtacggtcatcagtctcgtatccattttcaaaaatatctttaattaattcttggtattcacgcattaaatttttcctgaagaggagtaaagaaaagctgatcaccacgcttttcaaatcgtccaataatagacactacatcatctttgaccgtcacattgccatgtgacattccgatgaacatcttcttataatcacgttcaatttcaataggtatatttccatttcggttatatactgtagttgaaccgttataagtgctaagaccattataactgaaaactagaagatgaataccatgcttaaatggaaatcttttccacttcttttggactttgtcttctgatagctgagtgatatcatagtttgcgctcatagaccacctctgaaatgttagtcacttcatcaatatgataccagtgattttctttagtaatgaatcctgattctggacaagtaggagctgctacaaattcagcaggtagagtgacatcagaattcactctatgactttttctgatggttgtttggataaccctatctgcatatggatatgccttctggatgattccggcaccacctatgatagaataattaaggtctctattaaaagtgatagtactgttgtaagaagtatgagcggccataatgtcaccacccaagaaaccgataaattctaattcacttacataagcatctgcaaagaagccatttttagcagttgccaacgcacgactcatgtcttggacaacgattgtcttacgaccaggaagaggtttaggaaaactcataaaagtctttgctccgcaaatcaagatagtatctcgagtacgattagcaaagtttttcatgtcctgggaaatatgtttccatggaagaccatcgcctaaaccgaaagcattttcatttttgccgtctacagtttttgtaggagcaaaggcataaactatttgaatcatttaaacctcagcaaaattcaactcgttcaacattaccgtcttcccacttctgttgaagctcttggagacgtttgatagcgctatcaacgttagacattgcgcagatagttacccattcgcgtccgtcccaccaaatcaaatcatcataatcatctactgcgaaattttccattaaccttgcctcattccacacttaaaacaccggccacctaattgccataggctaccgccgcagtacttacaatcccagtcagttaaaatccacatgacttgtacccactagctttaatcatgttctgaagagttttaaacccttctttaatggcttctgcaatttcctcaaatacttcctttttcagaatatacaacgaacccgcttgattgccagaaagagctgaaatcacaacttggtcattaattaaaaattcgccatatgctgaatcaattttacctgaaacctgattgcctcgggaatgagggtcaaatacgagctcaatatgagttactccaggaatttcatcaaattggcagcgaatattaacgcgaggatatccagttacactaaatttagacatataaaaataatcctaatataatgccgctaataaaagcggcagtaacagaaattagcaaaactactaattcggcttcaatcatttcttggccttagcaagtttaaatgcttttttgaattcttcaacatcttcaacaggaatccagaagcctgagccatacccatcttcatagcatgggcagttatcacagtaatcattccaatagacagtttcaccacccatagtgaatggagcttccatttggcacagtacttcttcaacacgctctaattcttctgggtttttatcgcaaatgcagaaattccatttaccacgatattcagaaccaagtttgatgctttgacgttgaagtttcattttttattctccagtagattatggagctatactatcacaagcatagctccttgtaaacaattattcttcaaaatcttccataaagtaatcaatgtcgtcccattccagagattcaagatatgcaataaccttttctctagaaccgcggaggtcaatatttggccaaccaccaccaggtccatgacgcataatcaagtcaaaatcaataccatggtcagtgtcataaaaacgtgtaccatctgcatactccaaatctacacaaataccgtctttgttgataataggagttgctacgatatcaatgtttaatttacccatgatgttttcctctactcgttttgtttcgatgtagatatagtatcactcatcaactggcttgtaaacaattttgtgaaaatattttttggaggaataaagaaaaagggacccgaaggtccctttatattagaggtcgttcaaaatatcattcagatcgtcatcaccaacactgtcaccagcatcgcccatgatatcgtctgcggaacgagaagaggtcggtttggattcaaaatcagacaggtctttgtcaaaggaatccaggtcatcgccaattttatcggcttgagctgctgcttttgccgcggcaccaccaagagctgctgtacccataatctgtttaaatttggcttcgttaacttcaaacgatttaaactgagatggagcaacaatttcgctgaggtcagccatattttcggtcaggaatttctgagtttcttcatcattgatgtttgcaatctcggactgaccaaggaatttacattcatcatagttctggaaaccaccgactttcttaactttcatgacgaagtttgcaccttcatacacgcaagttacatcaaccggagtttcacccatatcaacatcaacttcaaccatcgcgttgattttgtccataattttctgaccgaaacggaatttgaatactttaccttcgttttctgggttagccgggtctttaataaccaggatgttagaccagaaagaagttttacgtttcagaagcttatattcagctgggttgctgttataagaatcgtttttactcagatgagcacaaaccgggcaagaatcaaaatcaccgtgagtagaagtacaattttcaatgtaccatttaccaccatgtttaaaaccgtgattgatcagttttacaaacggcagagagttttcatctttaccaggcaggaagcgaattactgcttgaccattaccagcattatcggtcttcagtttccattcgtttttatcttcattagagaaagaagaaccacctttcagaccagccagttgttgttgaagttgagcaggatttttacgcttgaacatatgattacctttttaatttaacagttgttgttgcaacatgggtccttgcaactggacgatagattaattatatactaatttctttacaagatttgattatgctaataaagagtttcttagcttcagcaccgtcaacgtttaaaagttttttataagcttttaatttagtggagtaattactccaaactaagttatccgttgcagtatcatgtgtatttattatatctaaaaacgagtcaagcatgatgaatgtctcgaaagatataacgtttgactgaagaagtttgaacacataagatgttccgactttctcattatattcaaaaatatcatgaagcttatctacattaactttcttggcaaaatagtaaatgttctttacatcttccgaaaatgtagtttttatttgcttcaacttaccaatatattcacgataaaatattaatgcatcagcatcactgatatcgccaatccatgcatcttggttagctacgaggttactcatgaatatcagtgttaactcttttaatgtatatttctcagcgagtttctcaaagaaatatttgtctctgcgcttttgataagctttatcagagacacgcatgacccaattatacttaacaacatcataacgaccagcgaagtgttgtttgagcattaaatataaaagataaacgctcttaccgttaacgtatctattattgttttggggcatgcgtagacgaatcataataaaaaatccagactattcgttttatgtgtttgactaaatgatggacgaagcatattttcttccaatgcttctgacataattttttctatgattgctggaggaatatatctattgaagtttccttcaggaatagaattttcttctaaccactgagttgttgcttcaagataccccattccaagttctgttaccatagactcaatagtaaatccgttagcttgcttatctaacagctgattaatggattcagagggggaggtatccccctcgtctttaagcgaaaatagagtcataagcttctaccacttcatctttttcagtttcaaaacgatcgcgtgtacctttatggaacagggcaagcagctgattaaacagtttgccttctacgccaagttctttcttggcgcggtctttaatgtctttgttaagctcaagatagctttctgctttcaacttattacctgaggcttccttaatcatatctcgcagagcctgtccgtgtaccgcttcatcaaatactacttgctctttttctttcttagccattatattcaccttaaaagttgttaatttctttcattaatttagacagaccggatttaacaaagtagctataaattttaccacgacccggtaattgatagttattataacaatctaaaatgttagcaacaatgtcttcgcggatgtaatcaaaatcgattaacacgcggttttccaagaaacgcttatactgttcttcagtaagcaaatctttaatgttttcgccagcatcaagacattcttcaacaaacgtcattttcgttgaaggagtacgctcgccatcaacatgagtgtaccaaaaatctgaacgaactttaatagaagcgacgttatctttcttgtcacctttaataattttaaccatacaatctaaagcaggagaaccggttttagattttaccagtttcttctgcattggtgaccattgcttaacattaggatacttatgcaattgagtaaagtcaccatccgaagaaacaatcatgactggatggccttcgagactgaactttttggttaataccgcaatgctgtcatcagcttcagctttatcaatatcaatgacataataaggcatatactgcttaaattcatcaattacagtacgaagaccttcaaagtaaccttcccagtcccaattggattcttcacgggctttagcacggttctttttataataatatgctacatcccggcgccagtatccgttgattgcattatcaacacaaatgacaatttttgtgtatccatctttcttccacttaaaagcattaaattttaaagtagaaagaataagatgacgaaccataggagtggttagtttgtcgccttctttatacgtatgaagaattgtcgccattgcgatttgcgacaagtcaatcagaatgacaccttcttttacttggtcttcttcggcgaataagcaatttaaatcagacatttgaacctcgttcaattagttagtacagccattataaatacttctataatgaagcataaccccataggagactctatgagcgatttactgaaacaacatttccgcgcaacgaacggcttggacgcaggcggaaataaagttataaatgtggcactagctgaccgcaacgttaaaaccgacggcgtctccgtcgagtacgttattcaagaaaacactatccaaaaatatgacccgacgcgtgggtatctcactgattttgctgtgacttatggacgtcgtatctggattgcaaataaagatattccaaagcctgctggagattttaaccaggcgaattggacttctttacgtgttgacccgaactggatttataccgtccgtaaaggagagtttgaaattcaatctggtcagttcatcaacgttgactctaacgctgcaggtaatgctacattactgcttccgttagcaccggatgaaggcgataccatcgtagttcgtgatattggcgggcgtcctggctataacggaatcttaattaaagcacaagatactggtgcgtctatcgtatttggtgaatcgcgtctgcgtgaggtaagacttacacgtccgtattcacaaattatgcttacgtttagtaatggtgcatggcgtgcaagtttaaccgattttggcgatactgccaagatggtagttccgaacgggattgttccgacgcaagttcaggcaggtgataacgtagttcgtcgttatacttccaactcagagatttttattactctgccgttgttcgctaattcaaacgatatcatcaattttactgaccttgatggtacatcgccgattaaccacatgactgtgcgtacgtttgacccaactatctcgattgggactcccggacaaacggaaattcaagtacgtacttcaggtaatgggtttttggtatatgactcgattgacaaaatctggcgtatttttgaaaatgatttacgcacccgagtaagaataattacttctgacgttactttaatgcctaatgagcatatttctgtatttggcgcagataacaatactgttaaaacaattaacgttactttgcctacagacgtagctgttggggatactgtcacaatcgcaatgaattatatgcgtaaaggacagactgtagtaattaaagcttctgatggtgataccatcgcgagcaatttgaatttactgcaatttccaaaacgttcagagtatccgcctgatgcagcatgggtgcaatcaagttcaatcacgtttaacggaaccacgtcgtatgttccagtacttaagcttgcttatattgaagaaaaagcaactggaaaaagttattggattgtaactgaatctgaccctactgtagaacgagttgacgctaaggataacacaaccagagcaagattaggtgttattgctcttgctacgcaagctcaagccaacgcggagtcaaatccagaaaaagaattagcaattactccagaaactttaaatgggcgtcgttctactgaaacccaaacaggtatagcaagaattgcaacttctagcgaagttaatcaggcaacaactgcttcttacttggataacgtaatcgttactcctaaaaagcttaacgaaagagctgctactgaaacccgtagaggtttagcagagatcgcgactaatgctaaaatggatgcaggaacagatgattttacgattgttactcctaaaaagttactttatcgtactacatcagattcacggttaggtgttattcaattagtaaaaaccggtggtgctcctaacacaactgctgatcgttcttctgctggcaccggcatattcgatcattctgattacaaaaatgcagttactccaaaaactcttcgtgagtataaagctactgtaaaccaatcaggaatagtctggttagcaagtgatagtgaagttagaaacggaactcctgcttcttcaaatattcctacggttgttacaccagaagctttgcacaaaaaagttgctactgatggagcaattggtttaatccaaatagctacacagacggaagttaatgctggcggcgtgactaataaagcagttacacctaaaacattaaatgaccgtacagcaactaacgatcgtactggtattgctcgcttcgcgacacctggtgcccagggtgaatttgaagctggtacttcaagtacagtaatggtaaaccctaaattactgttcgataaatttgctaatactgatcgtatccaagttaatactagttctggcttaactattactgggaacctctgggaccattataccatcaacatacaggaagcaagtacttctcaaagaggtacaaccactcttgctactgctgctgaggttagaaccggcaccgacaccaagaaaatagttactgctgccacgttgcacgcgaaaacagcaaccgaaggagctatcggtcttgctcagtatgctacgcaggcacaagttgatgcaggcacattaagcgatagaattgttcctcctgcttacttgaaacagactattcaggtaacagagtcatggcaagctacagacagcgttagagggaccgtgaggctatctacaggcgatggaacttggaaaggtaatgataccaatggctcaactcttccggataacgggtatgcctctaagggcgtcgcagtgtctccgtatgaattgaaccttacactgaaacattacttacctcgtcttggtaaagcctatgacaccggaatgctaggtggtcaaaccccagacaaatatgctcgtcgcgatatagcacagactatttctggagcttggacatttagtcaggatactgtgtttaataacaacatttctgtccagaatattttatatgctaatggtggtgaagtaaaagtttctccaactgctgacaccggaaacgtgcatgttcgttttcaaaatagagacggaactgaacgcggtataatttatgcagaaacccaaacagcttcagctggaaatttaaaagttcgtgtcaaaaacggaacaggaactactgctacaagccagacctacacctttggtggaaacggcacgctgaatgttcctaatgaagtatcaactaaaactctgaggtcttctggaaatgcagtagttggcggaactgttatggttaatgacgttcagatgcttgctgtcgagggattgaattcaatattcggtgcccaatcacagtccgcatttattcgttcccgtgacgctgatacacaaatttttgcacaggattcaactggatcgtatccaattttaactaccaaaaactatgcaagattagctgatggtcgttatgttaagaaagctggcgacaccatgaccggtaatcttaacttaagtggttctgctatcgtcattacaggttctgaatcgtggtatgtgccgactaatgatactgtattgcgacaaggttcttggactgctgaaatcaaagacgctactaaattgaaaggtcttcgtggttatatggttccaatcagaacaccgattgaccctgctaacccaagcactttagtagtgaccggatatgaagaaaaaactgcagctggtggtgttttaactcaggttggtgtaactacaaacaatacttatcaactttggacaccttatcctccaacaaccgaaactcctgataagcgtttcgcgcatactgtgtggatgaggatttataatccaaaccttaataagtttgatgattggatgcgagtatttacatctgctactcctccaaccgcagctgatatcggagctccaagctcagtatcaactcaggttaaaaccctcgaagttttggaatggattaagcttggcccagttaaaatctggccagaccgtccaaaccaaactctcaaatttgaatgggtaggtgattaatggctgaaccaattttaatggcagcctttggcgaggatttcgtggaaacacgagtcctctctgaggcaaattctgtgaagtattggctaaaagcttatgctacacattctaatgctgttccgaataagccagaattgaatattaatggtgcctttgatatgacctcctccttacggagggggattaatgttgttcaagttaacggcaatagttttattaactttaaaacttttgatgttaccactgatgataacaacgctaataacaaagcgtttgtagaatatgcaaatggattaacttcgggattgtatattataatgacacatgaacgatttcaatccagcccgttaatagacagatggtttaaaaacaagtggtctgcttcttggccaggttctgacttttccaaatcatttccaaactctgcctatgttggagtgctcggagcagcaaaaggacgcatattaattgagtcattttacggcaatgatggaaaggttaaagaagattccagagctaaagtagatactgtatatgataacgttggagatgtaggatatactggatgtccttatcgttctattgaagatactaatgaatactcggattctactggatatgaatataaacgttatccagtacaaaatgaatctataagcaaaatagctgattatggactatctcctggggattctgtatttttagtatgtgatatgtatgcatctaaaagtcttcttgatgctggttctactactagagctagcctgcgatggttcaagggcacatctttattatcttcaaacgtatcattagaagttccaaaaaatggagctgacaggtggctaagatttgaaagatttatcgctgttcctacagacgctgatggatttactattgttgtatcaagatatccaaaaacgtctgtagttggtgactctaaaatcaaaaaccttgtatttgttcaaacctctcacagtgaaaaattgaatagcgttgttcaagagtttggtgtgaatggtataagaatgaataaaggcgttgaaggaggaaccactatgattatggaacttccaaattcaaaagtcgatccgagcggtgttattccagttcaatcgttcagagaaacatcagactaaggaagccttcgggcttccttttttcgtataaatagaaaatatataagaggataaactatggccgatttaaaagcaggttcaacagttggcggaaatcctatttggcacgcgggtacttttcctcttgtgccggcaggaaactccctaacttatagaggtaagaaggtttatactgagatagataaacctcaagcaaatgataacgacttcgtgtccaaatcccgtggtggtacgtatacaggcgaagtaaaaatagcatatggcggctctggcaagttaagcatgggtccgttggcaaatgttggtattagagtcggtggtagtaatggtgaagttcttatcatcggagggaattcaacaattcaattgcgcggcggcggaacggaagattccagcggcatagttgaaattgctaaaaatggtaacttaactgcacagactggtagaattaccgctaacgtatttacttctaaacaacaaccatctggcgtagacgatttaactcgtaaagattatgttgatgggctaataaatactgttagcaacgtagctaacgcagcagtcaagaaagctggtgataccatgaccggtgtacttagggctaacgctggcgtagttatagtaaataaagcaacatccggtgaatatgctcctagattagatcaggttatttcacgcggggtaacaatagattttggcacatactaagaggtagccatggccgatcaaaacttaaaacaaatacaatttaaaagaactagcacagagaataaagcaccaggtgcagatatcgtagcccgtggcgaaatcgcgttgaatacacatgggcgtactcttgccatttacactaaagatgaagccgataacgttgttcagcttgtaggtaaaggtgttcctttcttagatactgcaggtaatcttaatgttgatggaactactacgttaaaagacaacgttactatttctccgaataaggcgatcaattttgaagcttcggatttaagcggagcattagtacgtcatatcaccggtaagtgtgctaataatgatggctggtacattggagctggtggtgcatctgaccagggatttcttgaaatcggtacgtatgataacggaaatgaacctatctattttgttcaaagaaccggtggaacgactcaagctgaagttcgtcgtttagcattattagatgggtttggcgatacatctatacctggggaccttcgtttaactaataaaacggtaaaaatttcaaacggaagcactcttactttggaaatgggtgtaggcgctaatgacgcgtacattaaaaacctgagaggaaccggtgttcttcaattaactaatgacagcaatttaacgttcagaaattctcaggtttattacgctatgaatggaagaggtcctggtaaatccggtactcttctgactaatgtagaaaacaatcgtcaggcgtggcaatatactatttctgctgcaactgctggaactccacgttgggttaaagtagctacaattaaacacccaggagatgcgtcttcacagttagatttaatgattactggtggcattgattctgggcacggaagacattatgttgattttatcacgttatcaggacgaaatttaacatcatggagcaccaacagtttagataactgggttgaatggcgccgggttgggtctccttctaaaacgaacgttccagagtattacgttgttaaaaacgattctgctacagattcagaggcttcatttgatttttacgctaaagttcctcgatacggcaatgccctttatgttacagtgctaaacaccgctggatataatggtcaagatagcggtaaagtaattatctatgaaaccggacaagatactggtgctactacaccatctggaagcattcttgtttcaatgaagcaaatttttgacagtctcgcaaaaccagatttcggtgatactacaggcactcttccggttaaccgcggtggtacaggtgctactaacgtaggagacgctcgaaataaccttggtcttagaacagctgctgtgcgtgatgttggggaatctagcggaaacgtaatggaggttggtgcctttggtgttggtggtaacggaaaatcactagtaaatattacttctgacgttgacttaatgactcgtcttaaggctcttggcggtacagtgtttagagccaacgtagcgagtggttataccggggctccttattactcccatggcaccgggttttatggaagagcttctgacacaatgtctgctcttaatatagactatgcaactggtatcgtcagagtatttgctacaaacgatagcggtttagccgccggcaaagtaaactctaatgttctctatggtacagcaaataagccatctaaggatgacgtcggacttggtaatctgacaaacgatacccaagtcaagaaagccggcgacaccatgactggtgatttaactgttcctaatttacatgcttccggtaccggtactgcgtcgttgtatattaacgcaggaaccggaaatgcccatatatggtttagaacaaataccaatgaacgtggtgtaatttgggcaactccaaatacagcggacttaggacaaattaatattcgcgcaagaaccactggaggcgcttctgccggtgattttagcttccgttctgatggccgcctggatgttcctgtagcagttaaagttggcggtgctgcaatgttaactaaagatggtaacatcacctctggttcaatgtttggcggtaaccttaacaactatttgacttctattaaaaatgatatcaccactggcgataataagcaagtaagcaagactggtgataccatgaccggtaacttgactattaacgctaacttaaaagtcgaaaatcctagtggaacatttgttgatttgggttcagagaactctgataagtatagcagattaacccttgctcgtaaagttggcgatggcgctgccgtagcaatgcttaaaattactcctgaaggatacgtgcaatttggttatcaaactgcagttgctactccatctcctactaagtacatccgagttaaacctgatggccttgatgtagaaggggatttagtttttaatcagacctatcgcggcactgaagaggcagtggatatttctgataagaccattgaccttaatagtcttgtcattaaaagaaccgacccaggtactcgtctgttgtataaatgtgtatcttctggcggtggaaataatatatcgaacaaacctacatctgatggcaactttgttcttgaagttctgtctttacgcaaggtttctgatactgattggtcatgtaagcagacctttactacaaagaacggtggtgttgaaggtgtatatattcgctacggtcaaaacggtacatggtctgcatggaaagaggttgttgctggtgttcaaccgatcaatttaggcggtactggagcaacatctgtagctgctgctcgtaataaccttggtgttggtgaaggacaaactgtaacattcggtaatttagttacaaccgatttaaccgcaaacggaaacgctagattagtcggaagactgaaccttggttctgcttctgcaactgctgtactgcgagccaatgaagcgggggcggttgttttaggttctgcgagtggtgcaaacatccacattagagcaggaagtgcagatacttctaatggtgaaacccgctttgagccaaatggaaacgttttagttggtggagctctaacgtcttcaggaagcttgcaagtaaatggcgaagccgcgatgagcagaagcttgatcgtttctcaaaacataaagaatactaacgataatagttttattctgatgggaaaagactccgatttaggtttcgttaaaaaatctaactcaggcgctaagctggtatttgcttcaggaaaatcatttgttgttgctaaatcatcagcaactgccatagctaatccagcttcggaaacttacactgatgtgtttaaagttgacgcagatggaaaccaaacagtttatggaaactcagcagtttctagagctttgactgtatcaagtacagcaactattaatggggttattaatgccaacggcggtattattgttcctactaccaagtatgtgcaaattgccgatgctcctacacagaataaccaagctgccaacaagaaatatgttgatgataaggttgcttctgctattagtaacgctggcgatacttatcttccattagccggtggtactgtaactggtaaccttgacgtaactggcaccagattaaaaacatggcagttagaagttgatggcaaaagtactctaagaggcgggttagatgttagtagcagtcttaaagtttctagcggaaacttagtcgccgctgacacaaccaatgctggtggtctttttgctaaaaacggtaatgtttactgtgatgcaggttcagctggtacaaactctaactactggttccgtgattctgctggaaatgtcagaggtgttatttggtcaaatggtcaaaacggtgaacaaagagttgcttgattcccctccactgctcaggactgatagaggcagctttgaggaagttctctttaccaaacttggaacccttgccgcctagggccgcaccagccacatcaccaagcacaccctgacgggcagtgtccagaatgtagttagccgtaccgttcagcatcttggtccaaggagagcgcgctgacaactcctgagtgccaaacttaatggtaccaatgactgacgccatggccccactggtatcggaagcctcacggattcgctgtacgatgtcctcacgccccggacggattaactggtcgagttccttaccgaacaacgccccatgaagttcgcggagttcactgccggaaaccggagaggttctggtcgctaggtcccgcaacgttgggataccatgaagcattgccttgacgttacccttagccaacatcccagagatttctgtgaggttctgcggacccatgtagaagttcttagcgaagaacgctaggtcattcaaggagcgcatagccgtctcaaaggctgtatcgttgttacggcgagcacgaccagtgagaatcttaacggtgtccttcagcgcttccacttcacccttcagctgtcccttacgttcggccttcttgtccaacgccatgatttcgtccttgagctgcttcgtggtcttaccgctgccgcccatgatggagatatcaccgttaactcgacggtcgtacgctgggataatccgtgccatgtcgaagtccctcaggtcgttgacactgaaggttgacccgtccggcaaggtgaccgggatgtcgctgtcgaacatgttacgggcttcaaggaacgagttgttctcgataccgaccagacctgtgatgttgtcatcaatgacgctggacgctgtgaagtcctctgtgtgactgataccgtaagccttgtccatggcgtgcttctggaccacctcaggtgtcacttggtctaccgacttgtagccgttaagttccatcaggtactcgtcgacacgtgccttgacctcaggccgcactcggtaactggtgagccagctctgagcgattgcctgttggagtccttcaggtccacccagcttctgcatcatcagttccttagcacccctgtcgtacacgttaggcacgtaggtacccttgtgtcgactaccggggaagatgctcactgcgttagcgttaccgaagatacccggctgttccatcagttcacgcttggtgtcgaagtgctctttaagcaggtccatcacctcacgttcacctttggtcaaatcagcctgtaactctggacgctcaatcgccaaggctgcacgcttgtagacttcctgacgaatggctctgcgtgacatcttctgctcacccacggagaactctgggtccttcatagcacggtcaacagcgtcatacagttggttatacatccgctggtcagtcgcatggagccgctcatggatgtccgaagctgtcgcaccgaacttaccgctagaccctgattgcatccccgtaggagaacgaacgaggtcctgagcgattgcacggacgccagcatccttggaccctaatgtcttcaggccaatctcagtgaacccaccgagtttgataccgggagctgcacgctctgggtcaatctctgcgaagtcgcgctgagtccttgggttaagcgggttggtgtcactcaggatggaaccattggccagaaccgccgcgccctcttcggttgggtggtcggcaaacggaacacctctgtggctctgctcgaacgagaagttctctggaggcagtgtcgaggtgtcgtgaccaccagtgttgatggcagtctctcgggcttccatgcggagtgctggaccagcgaactcattcacggattcaacaccacgtgccttacggataccagcggccacagcgtcactgagggccgacatgccagcgccgaacagtaacccaccgagtgctgcatcagcgtagtgagcttcgccaccagctactgacgtacggattccctcagaggcaacgctgagtgctccagcctgtgcacctactcgcagggccttattgaccaccttgagtcccttcccggccacaccgaccagaggtacgtaactgagtgggtctacaccagcaccaacgataccagcagcgagtttcgccccagtaccagcctcagcggcccgttggtcagcctcgaagttatccttggccagcttgatgagtgcgtcccagttctcaccgtcaccaccagtaaccacaccgtagtaactcggaggtaacccggagtcgcgcagcttctgtaagtcctccttggacgggacataagagttccagcgagtcggggtcatcgtgtccttgaacacatcgtacccatcgtcggctcgcgcagcacggaaggccacacctaatgtggagttctgaatctgagcatcagcagcatcaccgaatccaaagaatgttgacctagcgttatactcatcgagagtcgttccggtcttctcccagaagtccttggcgtatggtgtattaggtgcagcctgagccacaccctctacgtcgaacccatgggactccggcaggtcagtacctactttgccagcctttgagatgcccttgaaggcatcctctgcgggaatccctttaccctttggggtgataccaccgaacgcttccagagcaccggattgtggactctgggcaacgtccagcagcttacgcatgtagttccggccttcctcggagatagacccgaagtctcccttatcgtaagcctgaagctgaggtgctcccgatgggccttccccttggttgtacgctagggccgctttcagctcatccccgttgtacttcttaacgagattggaaagcagcttagcgccagcgtcaatggctaactcagggttgtagcgcccatcgtcgtcaccatcggtcacgttaaggcccatcgctcgggccgtgttgcgggtgaactgcatgattcccttagggccagtcttagagacggccttagggttgaaggatgattcgttaaacgataacttacgcaggaggtcgtaggagaccccatgagagtctgctgccttctggaagatgccatcgtaatcgctaggtttagacttatcgtagctcatgttgtctccttaatggttattggtcaccacctccatagatgaacttcggagtggctttacgtttcgcacggacacgctcaccagcggccttacgggcctgagtggctgcggcgataggtgcgcgtttggttgcttccttcagtgccttctcttcggcttccttagccagtcgctgctgctgttcctgataggttctagtcagtaactccttgtcgtagcggatgcgtacggtaccagtggtgtccatcatgtagatagagtcaccctgctggtacatcgtcagctgcttgttggtcacccaagggttagccgcgatgattcccttacgggcttcttcgaggatgtctcggccctgctcccagctcttagggtcatcactgacctgtaggatgttcttcgggataataccaatggtatcgccatccacgtcatcacctttgaaggtcacagtggattccttgaggaacttgtcgacctgctgcatcgccatgtcgctgttacctgtccggtacttgacactgtcgtaaatcttacgggccatgccatccagactagccggaatgcgggacagctctggggactctgagttgttcttcagggacgcccacgccttatcgtcctcatactgcatctcttttgtgagactgcggcgggaacggtcagcgtcgatgagaatctgcgggtcgatgccctgcttgtccatcatgtccatcgtcaggaacaaatcagccttgtccgggtacagtgcagcgaagaggtccgggtcggtgttacgcatggtgcgcagcttgttcaacgctgtggtgtcctctggtaacttaccgttaatcacagcggcagaccattcagacccagcgtcggttaccatctggcccacaacggtacggaaggctccaccctctgagtctgcccgtaggtagctcagcttcatgcggtccttctgctgctccgtgagctgcatctggtcaatctctgccagcttgccgttagcgtagttcaccatgtcactgtgagtgaactctccggtgttctcgttggtaggcatgtccttgtagctggtggacacgtactgaccgttgatacgcttggtgaactgctggtcgatgacctgattcttgttggtggtcttctgacgcttgtccatctctttggctgctgcttgggcctcctgacggaaacgggcctgcatctgctcctcagcctgaatcaatcgctcacgctctggggtcatctgctcaccgggttgtaggcggtcaagttccgctttggcaccctgaagcatctcccagcccttgctggtgtcgtcttggttcaacgcgctggtaatcccaaggcggaaaccttcggacaacttagcgtcattgtcgaactgggttgactgggccttgaccatcagggcgttccactgctcctctcccataagttccttgtaggtcgtggtcttcccgttaagggtgaccggacggtcctcaagactctgcaagaagttggtagcacccggacgctggatgacgtcgttaagggacccgatgatgacctgctgtgcctgagcgtcgctagggatgctcccagtcttaatcgcgttgtcgatgtagcgctggaagaactcaccggactctggacgcgccagaacggcagggtctttaagaacacctgacagctcgaccttcgaggccagtatggcacccttctgggcttggtcgctcaggaacgtatcatgcttaccgtacagtgagatgttacgctcagtgatgttcgcgttgaagcccctctggaactctgagtcctcagggttaatcatgaactgctcagcgtactcgttggcaccttcggtcaaccgcttgtggcgatactcttccatctcagcacgagtacgaaactcaccgttctgaaccctctgagctacctcatcgtcaatgaggaacgcagcgttacggccagtcttgaaccgtagggcctccatagcgtacgggtcatcctgatacagcagggtcccgttcttgattgcctctcggcgctgctctggggtcaacttgcggataatctcatcagaccgctcctcagccttgtcgcgctgtcgcttgtcgtaagcatccgctgcttcgcccatagctgtcccaaacttcgccaaggactgcactagattggactgcctgacaccttcctgttgaatggttactggacgatactgcatggacgctgagccacctcggatgcgggtagaccctgcctgcggtagttggcccaacgcttgttctaatttactagccattacttacctcctaccttagtacctttggcctgactgattggggccttggtggacttgctgtcgaacgcaccagaagcatatgcggatgctgcctgtgaacccatcattgccagagggtcgagcacctgttccagtttggatttacctttggtctcagccttctgcatggtcttaacttggtcgatagtcgactcagagttacccagctgctgagcgaacagggacgcatagtctcgacgatagttatcggtgaccgcgttggcctcccgaatgaacttgccctcctcgattcgactgatacgttccatactggctccctcaaggtttccctccccgatcgctgcacggattgtccccatggcctgaactttatcgagattcttggctgtcaggtctgcactggcttcttccagcttctgcttctgctcaaggctggcgttagcgttctgaatgtttgactctttaatcatctgggcagactgtcggcgcatctggtcattctgaaggccaatcatcttggcttcattacgcgactgaccgatagcttgtactgccgtcattgcgataggaatagctgccatccagcacatagttacctcctagttatggtgaacagttggaacttcccaccctgagtgtactcctcgtggaatacagcaccgatggacttaaggaaccgcttgtggggaccattaccgacccacacgaagttccacagggatggataaacattcaataacatgtccctgtactccatgattctctcacggaactccagcttgccagccctgtcgagtctccacacttggtcactcgtgacgaaccagcactggtctccgcaatgtccacctatagccaaaggaaaaccatcgtggtctaacgtgacacactcagtaaccgctgggaacgatggttctatacccatggcctgcgcctcaagtacgtcatggtaggccgggatgaataactcgaagtcattacttacagtgtttcttatgtacatgctttaagtcccctcttagtgtggtctccctatagtgctacctaattgagcggcaccacagggagacatttagttaaataccgttagcgcgtctgctgtagttaccctcccagccacacccaatgattgacactggggaagcgttgaaggaactcaaggacaccttctgatacagcgcgttacctgtcaccgggaaacgatactgaccagtggtcgtggccttctggcccagacgtagaccagtagaacctactcgggcgttgaccagatagttgaactcccggctgccgttatcgacgctcacagtgaacgcgccagtgtcctgataattcacccacgctctacgtagctgtagacggccagagtcctccgtggacgttgtaccgtcgttctgctcctgcttaatgaggaaccgactgaacacgtactgaaagtcatacaggaacccgatgacgatgtccttaccggagatgtcgccgctaatgcggatgtccggggttgaatcccaagaggaacccgtaggctcgtactcggtgattttaccgtcactctcgcagattgccacggtacctttagagaacgacgcaccgtagatgtccttgacgttcactaccgtctggttcgtctcaatgtcgtacgcagtctctgagatgtggtatgaccgcttggcgtccacgtggaatcggtaaggctcgaacggaaagtccgtagagttcttcttaaagtccaccgcagctatccacacgttgtaggcatttcgcatcagcatgtacatcgtcgagttgatgcagtttgcggccatcacctccacaccgtccccgaagtcccagtgggaccacgactgctggcggatgtcctcatccatgtagaggaacttgtagatgaacaccctgcttggagcacctttggttaacacacacgcgaagttctccgtcccagacccgttgatgctgtacacaccgttcgggatgtagttcggtacgtgagccgtcatgtcctctgcgttcttcacagagcttacatcctgtaccgcgtagtagcgcatgatggacgtaaaggagctgcgaggagacgcatagtagatgttcctaccgataccgtaaggacgagcgcggtctgacacgtcgaactgggtggtcaggtccagctgtgctgtcttagcggataatacaccgttggctgataggacgaactgtgcctcatcagaccacagcagaagctcctcagcgaagctcacagcgtacttcaggacagacactcggttatgactcacagcaacatccagcgggtcgtcgtccgtgtagttggctactgacggcgggtagaactcgaagtatttactggtacgggacatcacaatgttctccccagagatgaaccctaagcggttcctgaagaagaacacgtcagttatcgtagagttcacaaaggatggctgagggttggtatcctcgtcgccagcacgtcggtccttccaatcgtgatacccgaggtcaaagtttccgtcagctgcgcgaaccagtgtccaaggcatcgtggtgtaatccagtcctatcgagatgttccacccaacagtttccttccagaccttctgactcttgtcgtacttaacgtaatactggtcggcggtcttggatgtgtccccgacaatcttcaccatgtacccatctggtgcgttcagaggtaacttagagaagctctggacgtagtgagtaaccggattgattaactggtcggcgtatccatccttagtctccagtatgtcaatggtgatacctgctggagcgatgcagtggatgaaccctgttcccacgttgaacgtccacgtagggtgtgccgttctgagaagagtcgctagggcctcagcgatagcctgtgcgtcgacctttggtgggtcctccttagcgttgtcacccggcgggagctggtggctgacccacacgccgttaatgttcacttcgagctttcgcccgtactgcccaccgcgaacgttaatgatggcgtccacgttatccctgaaggtgccaccgttggtcaagttctgactctcacggacctgtctggtacggttaacgatgaatgtgtaatcggccacagtgaccatccgcaagttatccttagggttattgacggtcacgtaagagcggtcgccacggacctgatactcatagccggacaggtcgaatacccgaacgtcactccctgtgaacacggcgtaatactgctcgtattcgtcgcggttgatgaggtggatgtatgggtcttccccaagatacccacggcctcctaaggacttgatgaacaccataggtggtcgcttctggagaccctcagtctcggaggaccaaccgttgacctgaagcgaaccctgctctgggtaccgtaggatttcaggctgttggctaatgcctcccttgaggttcttgattgattgtgatacgagagccatttggtcctccttagtttctgattaacgaccgatgagaccctgaacgtatgcgtcaccatcaagcatgttgtactggccgaagtccatctcgtactcgttgcaggccatccgcgcttccatctcttcctgtgccagcgagttctctacgtcctccgctccgaagaaccgagagttgaactggcggctggccttggtgacaatccactggcggaaacactcaggcatctcgtcgtaatcctgaagggtaatcagggtcacggtgattggcccagagaaggtatctgtccctgtggacttatcgtacacccaaccaccacggttaacgtactggccaccaaggattgacaggtaggccggacggaacgggatgagtccagtgctggcatccggggtcaatgtggccgactcattgatattgaaggcccaacccttagactgaatctggcggttaatcctgttgaggatacgacgagcgttcgctacgtctgcgctgccatcttcgtcaagggttgtcaccggggattcgccgatggctgcgagcatctcgttgacagcatccagctcagcggcagacccaaagtaagcatcttgcatgttcataatgtaagctcctaacgaaaaaaacccctcagagaccgtgagtggtccccaaggggtttggcttagttttaattagtcacgaccagcttaaaggacttcctttcagacccgtcaaagctgacagtcaccagagtttcgcccacagcgattcctttgaagtacagcgtgttggtccggcgagtatggctggcaatccctgaagtaccataagttacctcaagggttgaccagtccgtcactccttccagcccatcaagtgccaccttaagtgaatcaccagcaatggtcacagtctgtacctcatactcaggcggagttaccgtccgagcactaaaggtatttacgcttaggccgccgtgaaaaccagcgcacccgcagactccggacgcaggccaccgtgacccatcgcgtacttagcgacaatctggtcagcctgatactcggtacgacgagcacgttccagagcgaggtctttcagcttgacggtaccaacagcggaacggtgctggaacaggcccacaacgttctctttgttgactttaccaccagttgccgggaaggcgtgcttctggttggtcgcttctgcatcttcgtccgggcggtcatcaccagcaccaccagcggtcaggtgcggaacctcaacgacttcgaagcccatcacgttacggatagaaccacgctcagggtcaatcagagccgcatagttcgcagcgttaggcatcagagccgccagaatcgcagagtacacgtccggggtggtgtagaacgtacggtcgttagccgggacgtagttcttggtcagagctgcacgagcaatggtcagctgtgcgataaccgcttggcccagcttgaccgggtcggtcaggtcagccttagcaccaacttccagcagggacggtttgcccagaccagcgatgttctcgttgacggaatccgcgaggttaaccagaccagccagctcagccagtaccgcaccatcagctgccatcgccagagattcaccaatctgagaggtgtactcggagcgaacgtcatagtggttcatcgcgtcttcgatgtcgtaaatcagcacgtccgcagtcagcaggccatcaatgttaatggtcttctcggtgtgcttgatgtctttacgtttgtcatccagagactcgcccggttgcaggtaagcagccttggtgcgaccaatcacagggaactgtgcggacttaccggagctgatttgacgctgcatgtgacggttggcggtcacagaggtacgagcgaatgcggtcaggacttcaccgccgaatactttcaggaatagcgccagcttgtctgctgcggattgacctttaccttggttagtaccgagctgctgtccaccttgcatgttagccatgttgaatctccttatgttgtttatacgaaatgttttgaggtactacttgaaacgaggtgatactcattgtgtaactcgaagggagccagagggacacgtaaggttactgtatcgtggctctccctatagtgctacctaattaaaacttagagtcgataaccttctgttccacttcacgacgatacttggagtcggtgcggtaacgcgggtcagacatagctttaatcatctcagcctgagactcgaagccttcagccttgcgggccacaggtttcgctggtgttgcacgcttggcaatagagcgctcagctttcttaccaaaggttttatcacgagactgtcccgctaggttcagaatcgtcttcatggtggctacgtcacgagactcaaaagccttgatgagcgcctcggcaccctcagggttattggtcttcatgtgaccgtagacctgctggaagcgctcgcggccacctacgaagtccatcactttctcgacgtactggttgaccagagcttcctgaccgcgaatgtacgcatcgacgaacgccttactgtagccagcctcggccaactctcggtaagactcctcggacagactgtcttcgttctggtactcctgctgaatacgggtcacagcatcctgtgagagaccgcgttcgattgcagtggcaaccatgtcgttaaagccagcttcgtgttcttccagctgctgggaggcttcgttgatgtcagccggagtttcgccaataggtttgaactcttcaggttcatcctcgtcggttacttcctccggttgactctcttcgtcgccatgctgttcttcttcttcagaaccctcttcaccttcggtagactcttcgtcggaaccgtcagcggagatgcggacctgcatacggccctcttcaggttcaccgaacgggtccacatcggagccatacgggtcatcactgttggtgttcagctcgattgcatcatcgccatcacgggcagcaacatcaagagccaacatgttttcttggtgctcctccggtgtactaccagtcagtacagcactgttgacaccgaaggatgcgtatacgtctgcgttagattcgccagccatttcaatctccttaaagttaagactaagagggaaacacgaaggactcgaaccttctgaccagacctcattcaatctggatgtgtctccctatagtgctacctaattacatgcccggttgcataccgactgaatcagccgctgcggccatcgcttcaggacttgcagtagcctgtgcggccaccccctgacccaacgctgcggccccttgctgtgtagcaatctgagcgccctgctgtgccataagggcattcttctcttcctgagtgagcagcataccagctgtgtcgagtccgatagcgttagcgattcgcaacttgaggttagccaagttgaggtcgtcatcaccttcgagggacttaagggctgaccacgcggcgatacaccgctccagcttgtcaaggtcctgaccgcgtccgatagcctcaaggccagtgctgatagttggctcgacggcctctttaggtaactccgggatttgctgcgtggcttgtagttgcttcaagagcactcttaccagaggcagctggagttcctgcgagagaatcgagtagacaccgccaagggtatcttccagctctgacgccacataccgaatctcttcggctgtgactcgctcgcctgtacgttgtaccgcactgttgagcataaaggcatacgagagtcgagactcaatggtgtcgcttacgttcttcgctacggtaaagtcaccggacttctccagctggaggaactcgatgtcctgcttacggcccggtacgaacgcaccagactgtgctgctgtgagtcggcggacctgagtgatacctgctgggtctaccagaccgataaccttggcggtaatcatggccatcttcacgatagactcttggaggttctctagggacttgaggtctcccagatactcttccacgtaggaacgtccgtaggattcaccgtcgatgcggaccatacggaccggaatgtacggacactcttcgagagggtactcggcttcacttcccggtactacctcttcggcgacctcttcgtacttcgagtaaccatccccggcttcgttcagatacacgtgtgtgtagatgtcaatctcagcgtcttccttctgctcaccttgggctgcttccacttggctgcgtacatcctcagggagagcgttaaacgcaatcttgtctagggtgacaatctggagcacgttaccgaaagcatctcgctggaccacatacgagttcagtcgatagagcttcataggggtataaccctcaggctccggtagatacagcagcgcgttcccggccacacacagttgcttcaggcactcaaagagcgtcactcggtaactgttggactcgatgtagttcatgatgatgcgctctaccattgagaggccctcatcgaccttagcgagaccctcagcgtcacccagaaggttcttcgcttcgtattcactaatggtcaacttcatccatgattgcatcgggaacagggccagcatcagcttggacgctaggttgttcagaccacgtgcacccacggattgccacggagtcgtataatcggttgaggcgttatcggagtccttagggaacagtgagggaatcgtgtactgcgcacaggactctgctcgtgtctcgtaaggttgtcggtcgttcttcagacggtcgtacaccgccttggctccctcctctgcgaagccttcgagtttaacttctgccatttgttagccctccccgtaaccaatcataagttaatcccaccgcctgagctgcgggaaactgagagggacttcttaccggacgcacgagttttcttcttaccagactcagtgtctgctgaagactcaacatcctccacgacctctttcggtgcttcctgaggtgctgccactggcgtctcagcggctgtctgcacgttgggtgcatctgctgccagaccaacggccttgagtggtgccttgactaccttggagatagccttcttgattttcttgaacagtcccatgttagcctcctaaagccgacttacggattttgctaccggaccctgtaggctcggtcgtcttggttaccttgagtgacttacgccctgacacctcaggagtggtgctgtttgagtcctcggagccaccgtactggatacccttaggttcctcagtgagtggcgctggctcagggacggtcgtcgtgtcaaccttaggtgctttcatcttaggtgagaaacacataatcaatctccttctttgagtgcacgctgacggccctccatctcatcaaggacacgcgaagccatgtggtgaccatacagtaccccagagatgaactcctcactgtgaccagcctcacgcagcttacggacctctgattgatacaggaagtcagcattgtagcgagactgtaggtactccttgacagctcgcggtacgtcaggaaggtcattaggattgttaaggatgtgctctataggttttaacatttgagtctcctctttaagtaatctttaagtaataatcataatgggcacttccctatagtgctacctaattagtgcccatgagtttatcactatgccttgtgctcgactatctgcttgataatcaaggccaacatccagagaccacgagcgattaaacccatggtcaggatgataagaatcagctgcccggttgccatagagtaatctccccagtctcgatgttatattcatctgaacggaggatgcgtgccatctggccctgcttgattacttccgcttcggtcatccctgctttggcaccaatggacttaatgcagtcccagagtgtctctcccggctcaggagcgcgtttcacccacttggttacctcttggcccttgttcttaccggacttcaggacggacgttacaggctccacaatgaatggttccttgaggaagtcctcagcggtatctccccatccgggaatcccaccgtaaccatcggtgatatcacccttgatagtctggaagaggtgccagtagtcggctgtctcctgagtctgcacgaggatgttaccagtggtacaccacaggaagtcacaatccgggatggtcttaaagtccttatcgcaggagaccagtacagccttctcgtagccgtagcacatcgggtctgacccaatgatacccatcacgtcatcaccttcgagctgaggctcaaggacgcacgtgtaggtctcaaagacgtactcaaggaactcgaagtaacctacaggcttcttagcgattgcgcggttctctttgtacgttgggtccaccagacgcttgcgccagttgacacggtcggtgaacgctaggacaacgtctgcattcttccacgccttcttacggcccttgtaggactcgatggagttctccagaatctcgcgggccttagcgtggtcacagcaacggtgccaaatctcctcatcccaagaggcatcgaactcagcggcactcatggcttggaataccaaccagtcaccatccatcacaaggacacccttggcaatcttctgggttgcccggtagtcactgaaggataacaatgtgtgcttactcactggtcacctccttatcacccaccacaattaccctgttgaactctcttcgtgtgaacgaaccccaccgagtttggtcaccaagtgttactgtcttagggttaatctttgtaaccacctcacgctcaaacgaggtatatccagccccaacgtagactacggtgtccccaatattgattgggtggccgaagtaatccaatggcgcactcataagcaacctccatgggtcttaaggaatttcactccggcactggtaatttcccaagcgccaccattgcgaccactcatggtcagacacgaaatgtgaccacggctcgcagcctcagcgactaacgcagcgttgttccgcacgtagttcgactggaaggacttagggcagcccttgagggccgccagaactttaaggtactcactcacttggtcaccctcacgattgctggggagaagcgcacggtcactgactcacagttgacctccttgccaagctccttgattgcttcacgcagaccactttgtaaaacgaaggctagcgccgcctcgtgtccgttggtgattgcctcggtgacgatgtgcgcctgacgtttgtccgtacctacagaatcggcaagttccagcaggtccttgaggaactcctgctcctgctcgttactcatagttgccgttacgtcaaacgttacgcgaaactttttgttcatacccatgataaatctcctgtataatattagtgacatacggcccagttcggacccatcttaccctctgtgtccagacggcaacggaacttgaagtggtccccaacgttacgcatagcttgctgcgcaatgtcaatgacctgttgtgcaatctctggtgtacgacaagccacttggatttcatcgtggacccacgccatgtacgcaaagtcaccatcccagccgtgcttcaagccagccttgagaagcaactcttcagtctcgacaatccacagcttacaaatgagcgcaccagctgactgaagcaacgtgttgagcgcggcatgtggtgaccgaacgtgtacctttcttccatccagtcccttaatccagcgtcgtttccacttgaccttctgctctccggcaacccatcgggatgactcgacgagggtctgctggattccttcacgcaacgctgcgattgctggggtgttctcaaggaatttcttcttgagttccttcccgcgttccttacctgctccaacgatttgtccaatcttttcatcaccagcaccatagaggaaaccgtagatgaatgtcttggcgttatcacgtgttggcaactcagcggcctgctggtttactgtgtggatgtccccgttaagaataacatctgcataagctcccccgtcgtacttggacatgaagtgtgcgagacaccgcaattccagaccactggcgtcgataccagcttgtacccaaggtagaccagtgaggccgtcaaggtggtgctcagcaccaaaagcagccctgcaaggctcgccgtaaggacttcgaacacccggtacttgcccgaggttcgggaagctgtgagttgctcgtcccgtaacggcaccattaggattgactgaaccatgaatcttaccatcctcttgaacgtaacgtagccacgctttgtcaccctcagccgcctgaccgatacgcttctgtatcatcaggtactctttgatgaggtcgatgcagcgctgcttctcagggtcatccacacgcacatgctcaaggacctcgtcgtctaccttaggtgcacccttttcggtgaactctgttggtacccatccggcttccttcagcttgagcgcaatgtggtctcggctacttgggttgaacacaacgtgctctactggtgtatacggagcgccctctacgtaatcccgagtgtccagctcgcagggttcacggccctcacgctgagctttgttcttgggtttcttgtagataccaccctgtttcgggtacttcactcgtgggtatttacccagaggtttaccagtgcgggggtgcaggaataactcagtgcctcccttaggttgataccaagtaccgaaagtgtcggtaagtgtctgaaggagttcagagcgacgaccagcgagttcaacgtaaagttcctcgatggccttggtgtcaaacgggaagccgttacgctcctgcttagcgagcaaccatgcggcccggtgttccagccatacagcctcacaggattctgaccagaaggttgtctcgcctacatctgtgaagtctatacccgctgggaagtagtgcttgtcactaagtagcttctctaagagcgccttggtcaccacaacgtcctgaacgttataatccatcatcggctcgttgaagctaatccactcagaaccgtccacatagtcctctccctgttcctcaaggagcttcttgaagtcatccttgtactcacccttcatctcacctaagcggtaaccccacgcctccagagcgtgagacccgaagcgcttgccgggtaatctaccggaacgcagcagcgccatatctgtgtccttaatgttcgcatacagcaaacgactaagcaccagtgtgtcgacgacgttctcgcgcggcaggtggaactctcggtttaactggagcttggccagcttggtcaacactggggcatcgtacttgtgaccgttgtggaatacgatgagaccaccacgagccacctcagcttccaacgcatcgagatacgctgagaagtcccaaggtcgatacgatacgtactcgtccgtactgtagtcataaatgactccgcagtggaactgagtgactttctctaagaggttattcgcctcgatatcggttactaacatagtggtctcctattacttaacaacgcccgatgaaatactcgcgtggtcggactgtcaacttacttttctcaatagcgaaactgccgtttgagacatcagcgcccagcctgctaacaccacgaacgtgggacacctgagcgtacttatcacccacactgcgtatgtacactattccacctagtacctcgtcatcccacgttgccagctcgccagccttcaggggagccttgtagtcgctccactttgccgcaggcttctgccagcccttaagcccactatgggtccaccctaagttctccagaatgtgaacggcagcatcacgcttggcttcataaatcttggaagcatcaagctccttattcagcttgtcaatctctttacggatttcttcaggtttacgcatggttatgtcctctcaatatgttgtgtgtgataatcataaaggccactacatatagtaatgaccttgagtttatcacttaacttctgacgcttcggccagacgtacggacgtttcgccaacctctttgctcaggattgcctcacgcactttgtcctcaccgatggccacagtagcggctacagctacggacgccagcagtcgagctgcctgtgtgtcgtcgagggtcacgcgctgagtgtgcgcacggttatcgctcttagccttccagcggtagaccagagtaaccttgtcgttgcgaacgttgatgtgaaccttgcggccccactggtcaacagtgtctgacagctgaatggtattgccggggaatttagctttggtagtcattagaagaactccttaagtttctgagctttagctgccaccttagcggcctctgcggttgcataaagcgctgcttcacgtgcgacatcggcctttgccgccagctgtgcagctgtaagggcctcgaccttagacactttgtcaagtgccttagcttcgcgaatgtacagcgcgatgaccagacggcctaatgtttcgataagtttaaacatgatggttctccttcagtggttacaatatggtgacgcccagtcacatgctgggcattgacatttctcagtagtcgtcttcttcgtgtccttcccagccagtatctccctctccttctccgccagtgtagctagacggttcaaggagtccggtcctttcgttgtactccatgtatcccgcaataccaacgccaataccattaaagcgacacttgagaatacgaaggaggacaagattaggcatgtccccttgctgattacgctcaagggcaatgatagtatcagagagttggcgcagagacccagacccacgcaagtcagtaatggaaacagcacgtccttcttcatgagctttacctttctccgggttcttcaggtggcaaataacaataagtaccactccggttgacttagcgaaccctttcagcttggtcatgagacggtcaatcatcttgcgctcatcggattcctccgaggcagacactacgattgagatgtggtccagaatgattacgtcacagttcaaccctgtgcgcatgtagtgcagcttggccagcaggcggtccacctcggcttccgcaaaggagtcgtagagatggaactggtcggtgccgtacagctcatcgaaccatttgtcatacgtcccgtcttctatcagtttctgcttgaactcccgaggctgctgccgtaagcggatgccgttagcaatccctaggacatcctccatggtctcctctacggactcctcaagcatagccatgcctaccctcagtccttgccctctggcgaaccctagggcctgctggcgaacgaacgtagacttacccattcctgacccagaagtgaccatgatgacttcgccaccacgtgcacccaaggttcggtcattcagtcccggacatcccgagaaaaggtatcctacgctctgttcgctggtcatggcctctcgcactcggtccttcatggacatcgcaccgataacaccatctggtacccaaggtgctgcgttccatatctggtcgagaacttccttgcccttgcctttgagtaaacactcgttggcgtccttctcggttaacacggccacgtggaccttaccgggaggtagaacctgagctgcttcctctacagctgcacgaccggggtcatccatgtcgaacatcaggataatctggtcgaagctgtcgaaatactcatagtttgcactacaagttttcttagcggctgacgcaccgtgaccgagagaaaccacaggccacttacagtcctgaagttgcatcacggttaacatatcgatttcaccctcggtgatgacaatcttcttaccaccgttccataggtgcttaccaaacagtgcgtcccctttgtgggaccctcgggtagagaagttcttctccttgtcccgcagcttctgagagacgatggagccattctggtcacgatagtcggccacctgataggcagtccctcggaccttggcgacccaatagccagccttctggcatgtcgcctttgagataccacgagcggtcaggtcagtgtaccgaccgtcactctcgccgaataccaataagcctgaaccttgtgtattcatcccgtaattccctcctttgggtcttctcgatgataacttttcggtacgttcctctgagccgggaacccggtgttgacacacgaagcaatactcgtgcccgtcagagtacactgagttaccatcagaagaaccacagttttcgcacggagcgtggaacaggaagacactctcctgaccatcttctcgactgtctccgtaactcataacgaggtaccgttgatgcatgatgcgacaaatgagaccacgaaggatagcgcccacaagcctaacagcccgtacgctaggaatgggattgggtcgaagtgctctttgaacttgttcataaagtaatctccgttggtgtggtcagtccgggaatcgaacccgaatgaaacgcagcgctacgtcagtggcacctaaagcctgaccataatttgtacaggatgtgcgacaacagggaaacgcgattgtctccctgtagtgctacctaattgtctactcttgtccgtcgttgaaccattccttattgatacagtaaagcgtgccaactattaagattggtaatccgaatatgatgagagcctgagtaaacatgtcaacccctgtcagaagtgaccagttcgttcttttcccaccagcgcttcaggttgaagctcggacaggctttgggcgctacgtcgtggtgtgccatcagaacggccccagcgtattgaaccttcagttccaccagcagtgaacgcagcgactgcatctgggctggcgtgaagttggcttcgtgattacctttggcgtcgataccacctacaaggcacacaccgaccgaagtcgagttgtaacccttaacgtgcgacccaacggcctcttggtcacggccagcttctaccgttccgtcgcggcgaatcacaaagtgatacccgatgtccagccatccctgctctttgtgccactgacgaatctcacggacgcctacgtccatagttgccttggtggctgaacagtgtacgaaaatctgagaggtctccttgcgcttcgtgaattgaaccttagccatctactttgctcctttcttctgtttgaatttgccgaacggtacatcacgcttcggctccttcagccagtctacgggaatcaatttgtcggcaaacaagatgttatgcttttcgcaccactcagcgtaactggtgggcgaccctttgtaaatcttggtccgtgacgacgagaataccagacgaatgtctagctctggatgttgctcacgaatcaataggtgcttcttgcggtcctcggcttcccagagacccttagtctccacgaagataccgttgggtaacaagaagtctggagtgtaaaggtggtcactcgcaggaataacgtaagggatgcgccacacttcgtagtcgaacgtgacgccctttgattctaactgcttggacaccttgtcctcaaggccagaccggaaggcacccaccttccgaatccctttggccccatagccagccattagaagtcatcgtcttcttcagcttcgccctcatccgcttcctcaccagaccaatcttccgggtcttcctgaggtttacggctgcgagattcgtccgcttcgtaaccgccttctacggcttcgtcagcccagtcgtcttcgccaccaccaaaggtagccagttcgaccagcatcacgccttccagctgcaacttaacggaagcgcccgctaccgcagaccagccgtacggtaccagagagaagcgaatcttcactttggaaccgccgccgataatcggaacgtcctgaatgcgcttgcccttcgcgtctactacgcccagaacaatcttcttggtctcgccagtcttcttgtcctcgtacgaaccgtagcacttgaagttgaacgtggtggttccgtcaccgttgtcgaagaacggcatgtcgccttcatacggcttcagaggtttcttacccttctgaaccttcggcgggttcgcttcgtgcgcttccagacgggccgcgtagttttcctcatgggtcttaacgatgaggtctaccagctcctgacagtcttcgttcttgaacgttacggaacctttgtaggtgccgcgtgggttctcaaaaccctcaccgccatagtccggcttgttgaagtaagcatacggctcacaggtaccaatcttggtggtataaatcttcttcttagcgaatgccatgatgaatctcctttaagtttaaacagtaagagggacagcctgtgtccctatagtgctacctaatgactatctgggcgtacccgagtcacttggcctaactcttcgtactccgcctcggcaacttcgagggcctcctcaagagacccagcgtgtaccgggagttcgtacgatgcgttagctgtctcgaccgttacgacgaacttttgcatcttctcgctccttccacatgttatacagggtgatgtacgcagggtcgagcgtcttctcgtacatcgctcggcaccagtcactcgggttcattgctaagaatctcctcaatgaactcaagctcctccttggtgaagtcctcagtctggtagattctgaggaagtccttcgcccaatacttcaggatttcaatacgactcggtgttaactcaatcatggcacagacccttatgcttgttgtacagttccagatagaaagtggccttcgccatgtctttctctaaggttgcaagctcggacttcttcccggcccgcaggcggtacttgaggatgttccctaggcagtaccctttgaacatctcttgggtcatgctgcgagcaatcacctcgatggcctcgacgccttcgaacagttggtaatgactcggttgcttgactccatcgtccgagtcgtcggctggtttcgtttgatgtcgccatgtgcaattacagtgagatttaccatgaagtgacgcacaataaatctcgtgcccattaacttcaggtgtggtgaacccacagtcgcacgctcggaagctgtgaagtgatgcgcagtggtctttgtgattactcattgaccacctccttgatacgctcccagaacaggcgaatacgcggccacttggttaccacaacgggtacgaaaggacggctcttagtctgagccaattcgtagagaccgcgagtaaccaagatgtgcacacgtggtgccagctcgaaggtgtcgccgatacgtggaatcttaccgtggcgctccgaggccgctacagtgctgcggtcctcccggcgaaccgagaagataccgttggatttattgaagtgtaagcgcatggtttatgctcctttaggtggctcgtcgttcatcgaccacactatagccgcgaggatgaacactacgattaaaatcagattgatggacatgttgttgtctcctatagtgctacctaattacatcttaatggtagggtcggcctcggtaccacgccatttgtcgaacgacgggtgacgcagagaaccgtctggagtttcctccatgtacttgatttgacacgcccagccctcgtaagggttgtccccacggattccgaaattgtcacgcacggattcctcaaccttggaggtgaactcgtccattaaggcctgagagatgttgttagcggagaccacgcgacccgactcaaggagaacctcgaagccaatcaccttgccctcgttggcaagaccgggagttccccagttgagtccaacaacaacaccatcggcctcattctctggcttcagtttccaccagccggacttcttgccgcgcttatagatgcctcgcgggtctttaaccaccagaccttcatgaccttcttctcgtttctgtcgataaagcgcatcgagttcgtccatgtcgtaaacttcatgggactctgagaggcaccactcgacttcagggaagtggtcttgcaggattggcaaggctaccttgacgtgctcgaggcggaggagggtcatcacgttgtagtcatcaccggactcgataatgtcaagcggaatgatatcgtagaggacgacttttagattgtaagggtcgaggtggaatggttgacgattggctttcttcttccactcatcgtgccagtattcacaggtagagaacgcaaagttgctctgcttgagccagacagtgcgaagcaggccagacccggtgttgaagtccgcacctttgaccatgagttcactatcaagcatgaagccatccgggaaaatccaacgatcatctttcagtaacttctgccagcgctggtcgaaaccgttgagatgctcaagggccggaatggtcttggagacccggctgagccacgctgagttggccgtgttgtctacgcaaatattcccgcgtacaccatcgtgcttagtgtctgcgatgaggtaaccagaagtctccagtgccttctcgatagcagagcgtacatacgaaacagctttaaaggggttggtcttaatgttcatcatgaggatgtctccgaagtgtagtgttcatttagtgtgcaataagcaatcataaaggccaccggaatccgatgaccttgagtctgcctatagtgctacctatttccactgttgcagagcttgaacctgctcgaccagatacccgttaacctgattgtacaggacgtcaatatccgtactctcaaagaccttgaagtgaatcagctggtggttatacgtgatgaatatcttcagccgccacaatcggtctgtagtggagtaccattcattgtatcccactggatgcttgtagtattccatcttattaacgaggtgccggaatgtcgcacctattggaccataaagtctaccgtacatggcttacgctcctacgaagtatttctcttgattaacaacgctgtcacccttcgcatttcggaaggagcctttgacaccaccaccacgctgagtcttattcagcttgcggcctttagggatataaccctcggtctgctgacgttcacgggtgcgctcgaagttaatagtgttctggtacatggtgttgctcctgtatgtattgacgttagggacattcatgaaggccaccgaacgtgatgaccttgagtatgttcctatagtgctaccttattcagacttaccgtggcgaaactcgatgcggcctactacttcgctcttgtagtagacgaactgtttgcgctcaccgttggtacacagctggtctatcaggtatcggtcctccagctcagtccacttgagggacttaacgtgcagaccacaagggccaagtcctaacttaaagactgtctttgcgtgaataccatccggtagcacagcagtgaacttgacgtgcataaggtctgagaccatgagaagttcattcaatagctcctcgttacgcttgcgcaggtgcttcattctgtcacgttgcgtggcaatgagttgactcttaccatcgatacgctccagtagttcctgattacgcacctcaaggtgtccgttccgcctcatgaggacatcttttgtctccaccgcttggcttaccttatgaaccaacatattaacctctgcttccttgtggtttaacttcttgcttatacactcctcgttgataatgtttgcccgaatgttcacgatgaataacgtaacgaagatgattaacaagatggttacaacgattgagtaagtcatggtgtgcctctttaagtattctttaagttaagactttaagtaatggaaccctcggtcattcgaaggttccctatagtgctacctaattgccggagaccttatgcaaacgcgaagtcagactctaagatatcgcgcagattcaggtcacctttggccgggaccgcaggcattttgtccagttgagattcatgcagctggtcagcgaactggtcataaaagtcagcaatcacatcgttgtcctcgtaggtcttgaccatcgtctcacggactgccttaaagagattcccagcgtctgccggaatggtcccgaaggagtcatgaatgagtgcgaaggagtcaatcccgtagacctcgttggcgtgcactacggtcatgcgcaggtgactaccatcctgtgagtgcacaaagttaggggcgattcctgactcctgcttatgtgcgtcaatctctttggcttcccctttgttgtacgtcatgaacacgttggcctgacctaagaacgttagcttcaggcgcgcttggtcgcgcttgtggtattcctgccacaccgggaagccgtctggtgtcacccagtggattgcacagcgcttacgaagtacctctttggtcttcttgtccttgacttcagcggccagtagcttagcggcagacttcagccagttcatcgcttcgacagcggccaccacggtcacggtcacagcgtcccaaatcagcttagccatgtagccagccgcttggttcgggtgagtgaacatcaggccctcgccgttgtcaatagcaggttgaatggtgtcctcaaggacttgctggcggaagccaaactccttggaaccatacgccaacgtcatgacggaacgcttagtcaccttgcgggtcacgccgtattgtaaccactgcgcagccagtacggactcacccagcgttaccttctcgcggaactctccagtctccttgtcggcaatctgctcgaccaccgtctgagacccgttaacagcgtgctgctggagcacctcgttaaccttgtcggcaacaatcttgtagatatcctgcacggtatcagaaggcagcaggttaaccgcacgaccaccgatagaatcgcggagcatcgcgctgaagtgttgaatcccagagcatgacccatcgaacgccagcggcagcgaacagttgtaattcaggccgtgatgtttaactcctgcgtactcaaagcagaacgccaagaaacagaacggtgaatcttgctgtgtccaccaagtgttattcagtgggtcggctgcgctcgccagaatgttaccctcattctcttcaatgaacttaatacgctcagggaaaggaactttatcgacgcctgcgcagtttgcaccgtgaatcttcagccagtagaacccatcgagaccaatcggtttgcccttggccagtgtcagcatacccttggtcatgtcgttaccctgcgggttgaacatgctcacagcgtacacacgtccacgccagtccatgttgtatgggaaccagatggccttatggttagcaaatttgttggcctgtgcaaccatgaactccattgacaaacggcgagactgtcgtgccttgtccttacggtagaccgctgcggcctccttgcgccatgccttgcgtgccacctcgttggtgtcgatatcgtccgggcgtggcggtaactcttcgcgttcaatcgctgggacgtcacctaccgggcagtgcttccagttgacaatctcattgactaccgccagtaccttcttgttcaccttccacggagtgttttgagcaaggtttaccgccttgtacacctcgggcatgtggacgtcatcgtaacggcgtagcgccttcttggagtgggtacgcaccagtgccaacgggcgacggccgactgaccaatagccaccgcccacggttcctacccaaggcttcggagggactacgcacggctggtgcatcgggctgatacctgcgagtgcgcccgctcgtttgctcaggagttccacaaaggccggagccagttgtaccatttgcatactggtgacatcatccgaaccgtccgccatcttgttcttggtcatctccaccagaccagtaccctcaatgagcagctccagcagcttggtccccacgtgcatctgctcgtcagttttccagctcgcccagttgtcgccacccagcatccctttggatatcatgtcagactcgacaacttgcataaacgccttcttgtacacgtgacccacccgcttgtccagctggtccgctacgttcttcttgaagtaggtggcttcctgctcgcggatacgaccgaagcgcgcctcatcctcaagggccttgcctaactgagaggacacctgctggatggtggccttagaggcatctgtgagcgtccctaagacgaccttaatggtcagtagtgcgatagcctcactggatactccacgcttctcgttgagcacctcagtgcccatgctaatggctaactctgaggccacgccgtgcttaatcgggtagtatgcgcgaggcttcttaccacgtgcggttgcttgctcctctttccaatcgttaatacgtttggttaactgcgggtgcagcgttaagaccagcggcttagcggccacgttgtcagcaaactcaccagctttaacctgacgttctaacatcttcagaaaacgctgctcgcccagctcgtatgcttcatgctcaagcgccagctgttcacgtgccagtttatccccgtagtgctcgctgaggatgttgtaagggatagcagccagttcaatctcggagaagtcattacgtgcaatgtttaatgcgttcattgtgtgcctctttgtgaataaagtttatctatcggtgcctcttgcgtgagagacacctaagatacaccttgtcaacccataagtctaccctgaaggtagttgtccaccggaaggccccgaccctgctgtatggcgagaccatcacaggccatccatgcgtgcactcgctgctcgattaccgcaaggtcgtacttgagggcctcgacgttaatccgttcgcgctccttacgccacctagcgtgtgccttacgacgtgcgcggcgttccttgttggccttccggcgtgcgatgagcagctccccgttcgggtcacgcttagccttgttgcgcttacagcgttcaatcatcttgtcgtgtgctatctgctcaatctctgcaagtagctcctcaggttccagcgagaaaggctcacgttcgcggtcctttgagaatgacaccgggtccgtaataactggcttgccgtccttggtgaacataatgttaccgctatgcatatcaaaggacgcgataccatggaagaacttgcgaatcatctggcacgtctcaatgaacgctaggtccttctcgtgatgctcctcgggtgcataaccacactcgacaaagtaatacgcaaggtctgcgtagcggtcgtgctcatcgttctctcggcgctggcatggttccagctcatccagtaccaccgtatagcagccagcgtgacgcgctacgtgatagacgttgggaatccctacccggccttggtgcatccggcagaaagccacgtaggcggcccctgagtcctctttcttaaagccaaccttaatgaccctacccggtagcagctcgtgattaaacgctgcgctgaagtgaccattgcccagcaggttaaacccagcgtctttggccttaatcttcagggtttgccagtagtcctgacgttccagaccccaatcgctatccgtatcgtcaccgtctgacgtctcgcagttcacgatgtccgcgatgagtgctaccagcagcggctggcgcttgtcgagttcacagattggtaggttacggatggcgtctaagcgcgcttgcatatcggtgtagttcattagttgtttccttaagtggtatgtggttagttaattggtaaacttcaggttattgcctacgtgcttccagtggtgtaacagctcggtgcgcatgtattcgccttgcagtatggtatccatctgggtagacgcccagacgtacttatcgatactcagtatatgcactacaaagtccttaatgtccgggttagcgtacaccttggtgtcaatgcgttgcgacatagaatattcctactttgtttgccttaaagcggccattaggtagtcttacagtaaagcgcggcagtatgccccacttcaggtaactaaacgatgccttgtgtaccttaaggcccttgcgaaagtcccgcacaaagtacaggacaatcagggcgtacacaaagagtacaaagagtgttaacactcagtagcctcctgttaacgtgatggttagtgcctctgagttggcgttgaacgtcaggccacgcttaacgagacccgctatggtgtccagaaagttatcaaggttactgcattcgattgtcattgtacattaccttacgtgtccggtaggtttgggccagttgagccatgcaatactcgaaggaggcaccgtaagccatagctatacgatatgtcctgatgtgcttctgagtgagtccgtagtacttcatacaacctcccagtattgcccattgatgaccgagtagcactcacccttaggcacatctacacgttgcagcgtgccacccagtgcatcctctttgagtcgtgggtagacttgcggatactctccgaccatttcgatagaccagagactagccgtgtgagtctgagagttcaccaccagtacagcgtcttgattgtacgtcttgcaagctaaccacgttaactcagcggcctgtttgatagtgcattcaaccttaagcgtgcgctcttcagtggcgtactccatgccagcctctttgaagcaacccgtgacgttctcatcgcggatgttaccataggcacccggataggtcttaatggtgcggacgagacccttgagtaccttctcgttaacttcgagcgtctcatggccacgataagcggtgacgaatacgaagaccttgtttgctggctctttagtgtgaatcatgatgtttatcccttcagtcgattagtggttatcagtgtggctactctcagggtgacagggcgtgccttatcaggggcctgaatgtaaccactagttaaacactaatgtcatggtgtacatattcagctttgactaatccatattgttaaagagcggtgctacttggtactgcgtgttactgcttgcttactacgttactacttgttcatcgttgagtcaaccactttcgtatgtccggttgatgactacttgagaccctcagtctaaccagataactcgtggtattgtctggtcgttggtgacgttgtgtctctcaacggttgctaatgtctcataacggattctgaatgtcaataccttaagttaaactttatgtagacctatagtgatagttatctttatggtgatggtctcttagtaatacttaaagtgtctccctatagtgatacctaattgagtgatgtattgacactgaccactgaatagccttataataatgactcaccgataccctttgtcccgctctcagtgtctcagggactgctaaacgagatacttaatgacgctcttaatgtgacctactaacagtcactgctaaacgttagtcacacggtgaacctaaggtatagtgtcgatggatgtcctcaggtattacctcaggttggctcctcaggtatgacttaatgagtaccaacagatagggacagatagacatcaacatatagtgtcattaggtcccactcaccacaacatatagtatcacctaagggattcccaaggtaccacctaaggttaaaccttcggttagggtggccctatggttactttgggtgaactggagggtaccggggggataaccaaaagtgtaaactgtgagatgtacactcagaactttatgtaaaattcttaaaggtaacctcaggtagtcctcaggtcagtgcatagacccgtaggtagacccagtgaatcacctaaggttaactttaagtattgactgtagagggatggagtggtgtatgctgataagcatcactacggaatccctagcgcgtcaggaagaccctaatcgctacaagtgagtatagagcacacgagagtctccagtccactgagttgctgctgagtaaccagtgaagccccaagggcaccagcaagtaccagcagaaatcgccaagtagtcctatggcgcagtaatgttaacagtaagcgcataggtcctccttgtgttagctcttagtgtcttatagttagagggagtaatgataatatcaccctctctcatagaggagacctgtagtgcataactatatgaatgaaactttaagtgttcttatagtaagtctttaggggtctctccctatagtgctacctaattccaagtgcctgttatgcctgaagttttcctgaagtggccttccgtggcctaatgaatccttatgcacaatccctgcataatcaccatgcgatgaacatagagtcatccccatcgtcttcccatcggatgtccacaccgttgctgctggtggcccggaactgggagacgttactcaggggcttctccatgtggtgctccaagaactccagaagtacctctgcctctatcttaacggcgtcctgctgcatcgtagagcggaggaactcgacacctaatgccaatgcatcaagtcggtcatcatgtgccacagcgcctttctcacggctcatacgggtcatctggtagaacaggctgtacttcagagcgtgcttaccgtctgcgtcacgtgccgtctggtagtcctgtcggataacctcatcacggatgaccaagcggtgacttgccagtacaggctcaagggtatcgcagatacgtacctctttcataccacgagcacgaatctcttcgagttgcgctgggtgatgcttcaggagcacaggctggaacacgttaccgaacataccgtcaccgaagttactctcgaagaccacagtctgcacctgccactgcttagccttcttagcgaggaactcaagggacttctcttcgtacccacgagtaccaccagcatccatcaggtagatgtaaccgttgagggtgtacagtacgcaccagccagtctcatccttaccgcgaccacttgggtcaatgaccagaatcttaccctgatacgcgccagtgttactggaggctgtatggaaggagtaaatctcgtcacccttcatgcccacgttaggaagctcctcattgcggttctgacggttcggcagccactggtagtgcattggggccttgtccatctgtagaccgcacacgatagcgtcacggaggcgtagagggtacttctcggcgtcactgaggttcgggttgagcatgaactgaagcgtatagccagccttgccgtattccacctcacgttcctgaaggtccatggagtcgaatcgaaccgggtcggtaggttggctactgaggccctctttgtcctcgtcgtactcactgcggagcatcggagccagacggtcgccatagtacaggtcttcctctttggagcgaggatactgtgcaggccagataatggtggagtacccacggttgtcctcaagttccttgtagagcgtcatctcggtctgaggagtacctagatagataacacgactagtcggtagaggtttcaacagtgcggcgaactcctgaaccaacgtccagagtttctctcgggcaccttgggttgcagagttaccgggaatctccacgtcatccgcaatgatgatatcggcacggctaccagtaagctgacccgtaatacccacagacttaactgacgggctgtggtccggcttggcagggcctacatcaaagctaatcacggagtcacgctgaccggggcgaggtttaagctcactcaggaaaggcaacaagtcgatgatgttcttgatgaagatggagttagcatccgcacgttcctttgaggctgagacaatcagtatctttaactgagggtcacgccatagggtccacactacgaacgcacacgtgatgaacgacttcccgataccacggaaagcctgaaggataaacttcttgttcttggggtctgccagacacttggccatgtctatttgacacttggtgggttccggcaggttcagggccttccagagcacgaagagaaaggcgacaaagtcacccttcagttgcgcaatgattaaggcgttcttggcttgctgagagttactcaatgttcacctcctttcccttgcagcttacgaatagtgtcctgtagggccttctctttgaggtcggccttctgggttattgcgacaagacttcgagcagttgcttcgtgtagttcgacggaaccatcaacgaggcatcgaccgtctggtcctgcggggacactggtaggtttgactttgacgcgcagccgcttattgtcgctacgcaaatcagcaataatcctatcagtgctgccctccagcccttcaaggtctgcttggtacttagccgatactgcatcaatcgctttctgagtttcagctctagccgtttgcttcttaacgtactcattctgtactacctccttccatttagcgtccgtagattgtgaacccaagtgccacccgaaggcaaacaccatgatagccacaagatacgggacgattctctttgtgaactccagcataatgcctcccgttgtttctcagatttcacgtaggaacgcctagcgtagtgcaatgacatccataaaggcactacatatagtagtaccttgagtatatcactgtagggtgaacttatcgtcgtctgtcagaccatcagcacccaccttggagttgtaagcctccagaccctcagccagtccgcccaagatgttaacgtcaggggtcagcttagagatttggaacttatgacgctccagtagtttaccaatggcgttgtacagctgaggggtccgcttctcgggattcttcaggtccatgagcatctgctgagccatctcagtgtctaacatttcgaggaacttaatcaggtccatatgttactccttattagctttcttccagtcaatgattttgtcgactaccttggcaccaatctgaaccactgtgtaggcgattgccgcgacgtagaaccactcgttgagtgagaggccccaaaagagcctcgctacgccatcagccccagcgacacccgcaatgggagccgccttgataacttcgttgttgaagtctagggacaacatgatacctccttattagaactctggagcgtacgtaccactaatctgaatggtcgcatcggcatcgtacagagtgtccggcttgatgaggacgttagggattcgaacagccacccaagggttctggtcgttaacggtgacgctacagttcaccctcgtggtcgctgagtccgggcagttcaccgacaccgaggcggctgtcagtgtaccgtcagctgaaccgtagtaggttgcctgagcgtagcccaacgactgtccgtgagttatgttcacaactcccggtgctaccacagtcgcagtgatatttcggcctagccaacccggagtagcaccggtacgcatggcgcgaatctcaccagtaactgtgtttacgatgaactcgacgtcacagtacaccaccgccttaacgatatagtcaaggtccattgtgataatctcagcggttgctttgaatccctgcatcacaagcccacggtttatagacgcccgcacgttgaaccagttcgatgctttgtccgcaacaatgaactcaagcgagttaccgtcggctgctgttcggattccgttaatgttcgatgggtgccagcgcccaatgtcgttagagcgttgcagcaaggcccatgagttagtggagccagcccaacggattgaagcatttacgtcctgagcagccgcccacggagccacagacttgctgtacatctcaaggtctgggacggtcttagaggtgataccactagactccttagaccataggccgcgcgcaccctcacgtcccattaggttgtagcctctctgggtgtagtggacaccttcggtcccgatgttgccatcacggagcaggaaggaagggcacccatcaaatacggtgaccatgttgtcacgaccacgggtgcaataccgctgggcgttctgaatggtggcccatgtgtattcctgacggtttgccggacagcccactgtgaagttacagaaaaggtctacacccatatctgtaaccacgtcgtcattgagttgaatcatcaacccacgatacgcatcgaacggggtgaaggaactcatgtcagactcaccttggtggaacatgaagtacaccttaccaatggtaagcccttgagcggccatgcgggccttagccgccgcgaccccgtcaaccatgcgagagtagtagttgttactctgacccttactcaaggcttggattgtctgagcgccgcgtccacagtggaccacgaccgaccctctccccgagagtctgtaccactcgttcgcaaactcaccccaagcgtgccctgacgaagccacaccgttcgcgctgacgatgttctggatgataggcttaatggtaccatctgtgaagtcatacatcagggacgctggcagtggctgagggaacccagcggtagaaccagagagtattgcctccccggcactgttggactgaccgtaggtgatgatgatgtcatacacccctgtgaacttgggtaggtacccgagctggtcgatagcctcttggatagtgcgcccatccttgagcacaccaatggttgaacctttcggctggttaaaatcgttctttatcatatcgtcctccttagaacgtagagagtgcaacccgtttccatgtgttgaacgctacgcacacataaaggaaccctgagtcgatggcgatatcccctgtgttaccagaagatgaagaagcagctggtggcgtcacagtgcgcccaacgaacagtttaccgtccgtctggcttgtagggtccgcaccgtactggaagtacagctgacctgcaccattgccagcccagattcggtacccaccgaccctgaacgtactggtgtcccaagacccgagaacggcaaggcccttgaacgacacaacatggttcgggtagttattgtcgaagcctaaccctacagctggcgcagagtcgcccttaccgaagcggattccaccgttaccaattgacgctcttgggaatgactcaccgtcaacaaatacaccaatagcctgagaggtggctgacgagacgcccacagtgaacgtcttggcgctaccaatgtggtgggtattgtagttaatcttatcgacgactttaatgttgcagaagtcggtacgataggaatacgccgggtcgtagttgtcgagcatgtgagacgggcgggcaccatttatcaggttaacacaataagctgcccttgctgagctgctgccgtctgctggttggtacgcctcgtggatgttaccaacaacaatgtgccctcgaccgtagctaagcgtgatgttgctgtagacgccgtctgaagacgttgagttgttccagaagcggttatcgacaatgacgataccagcaggttgcatgtacggacacgcaatgtacacaccgtgttctccgttagagttcagtgtgcaggcgatgagcttaaagaatgtcttcccggttgcctgcgtgtacacaacaccagacttcttgttgaagtataaatcacagttagacaccacgtttgactcgttaagcaactcaatgccgtgaccagtcccactacgcccaacgtaggtgtggtcgattcgccagtcaacgccttggattcgaatacaagtcaggtcggcagattcacactgagtgtccttaatgataccaaaggagcgagaagctccaccaatgatgttgagaccagagaatccagagatgttgcaattatacagctggaaaccagacttgtagacaccagaagtattatcaacctgtcgtagaccgttaaggcgctgtccgtctaccttagtcagcgggcgaccacgcgcatcaatcgtaacgttgaacattgtcacggtctgctctgcggtaatcagaatgaagtccccagagtgtactacagggccagagttacctttaggaatcagaccgcctccctgacgacgaccccctgctgcaatagtcatcacatgtggtatcaccaagttctgacagatgtacatcttggaagcgtcgagccatagagtcttacctttagctgcgtttattgccgcttgaaccgctgcggtgtcatcggtcaccccatcgcccttcgccccaaacgactctggcacaatgtagtacccaaggttatccagtgcagactgaacgttaccaccatctttggtaccaatcgaggatgcacctgtggtcccagcaagaagggattctaatggtaggtgggactcggaggtcattgccatcaagaagtctccagcaaccaaaggcttcgctaaagtgattgtctgggtactggcattgaagtcgtactgatagcccacctcttgcctgtcgccgtttatctcaatgtacggcacggcaaacacagctgtcggtttattgattacgatagacgtctcaccgccgactgccgcgcctccgttgtagacccaagtcactccgcgaatcatcgtggtatcgtctgcaaacttctcaaggtactcgtagaactgttccttttcacctttgatctctgagaggattccgccagcctcgcctaaggtagtgtcaagctggttcttgttgattgcgtctgtgccttcaacacccggagccaaccgtacgattctacgatttcgagcatcaaggttacccgcatcatcctgaggcatggccatgagtgccgcatcacgtgcttcctctgcgatatgtgctgactgtatctgagatacgttaaggtcggcagcgcggagaaccgagccatcactgaagtcaacgattcgctcagacgctgaggtgaaccgtcggatttccacacggtcgaacccagatgtatccacaaggagcttcactctggtcttagacacgtagcggtactcagtgatgttgctcagcagtctgcggttgtcgtctgacaccagcgacacacggacaaacttacgggacaggtagtcgaacgggatgtcgaactcagtggcccctactgggtactggatgactgttttaatttcttggtccatcgtgacctcctttagtttaatgagaagggaaaccgctctggtctccctatagtgctacctaattagttaggcttcggctgctgcttgatggtgaccccgttagcctcatagattttcatgatgagctgctgggtcagcgggtcgttcggcacgagctccttggtggagttcatcagaccagtcatgtagtcacgctcagtcggcttgttgggtgctgtagcaacaccgtaggcgttcttggcggtagcaatgacgttccctacgtaacccagagccggtacctgagaccctaagttgcccgcaaggttgctagactcggctcgacctttggacgctccgtctttcttctggaactgttcctccttaggtaagatggtggagcgcagcatgttggcatcttggaacccagcggcacctgcaatcatcgaggcgatggacagaggggcaccagtgtgggaacttcgagtcaacgctgcgtagcccagcatggtcgggttcagggctttcttcaggtaatccttacgttgagactcttggaggccgtaagccttcacatgggcctgcatcgcaaagtaggtcccggcgataccaagcgacaggatatgggtcaacgccatgtcgatagcgcggttgttcttgtagccctcgtagaaggaccgaatgaacttagcgttgagtgacttgatggtgaagttcttgaactgcatagccatcttgacaccagcaccgtacgccttggaatcctgctgagataccttgtgagggcgcagcatggtctcatcggcaaccttatcggcaagacgccacaggtccatcgctctcgggtcctgactgaaagccttcttgtccttgatggtgaactggccgttagcatcacgagtcgcgtggtcg

SEQ ID NO: 33 - DNA, 166254 bp, unidentified
  source 1..166254: mol_type = genomic DNA
tatccattttcatcacagatgaccttgttcttcatcaagaagtattcgtcatcagtaaaatgcacatgctttactttacagcctttactcatagcttctagagcttcttgccaatttaaccagttcatattttcctctcgagttaaacggtatgctgttatccgttgatagagctatagtatcactcatcaactagcttgtaaacaactttgtgaaaggagtttagaataaaagagaggtcccataggaacctctaaatgaagggtatagaaatatacagaaggtggtcaagatgaccttagaaaggaactggttaatcttctatgatatctgggtcatgcccagcagcaataagattggttttgaatgttggaatgtcatactgcttaacgttatccataaaaatgacaggataccgaatagcaagcgatggatagcacccgatgcgtttagcaagtgactcaatcaacggacggtcataaaccggttgaccgtcaacctcgttgattacattatagaactcatacggaagttgcagcttatcgagcaagtcacgaactgctttacatccagggcatctccaaacttcttcagggatgccatagatttctatcatagttcagccttaatctcagaaatcaatctttcaattaattcaagtttatccgctgtagtcataggataaattttgtcaacagtggcttcttcaagatagcaacggtcagcatcgttaagtatacaccactgatcaaaatcatcagcatctatgctaacaccgttgaaggtcttaactcgttcaacagacccgtcctgtgtcagagctgttaccaaaaatggcttaaatttaagcatgttgtagaattcaacatcctttgacgatgcgttatttagccatttatcaacagagtcttctttaaacttgtaccacttatcgcaacaaaataattctatcatttcatgacctgttgaagtttagcagtcagagtattaacacgcttctgaaattcttcattagacagtttttcatctttcttggtaggattaatccaatcagaaataatgatgagaacaataaatggaatagctacgaaagcacctgcggttaatgcaaccagtgcaataacattagaaataaatttacgaatagcattaatgaatttcataattttccttaaatagttaagatgaatgctgtcatagccagaaattctggtccaaacagttcagtagccatgtggttcagagtaaacataattttgtaagtcagcatataaatttcctcaatcatgtgtccaggtagaaccgtttcttacccagagtctttggttgtcagaaccacgccagtttttagtagttggcagtgatttctcatatttcccatcaattataacatcgatgtgttgtagcaaatctaaatctttgatatcttcaaacttatatcctgtccacatccagatatctttctccggaaatcttgctttaacccaagaaactaaatttgaaatctcttctcggttctgtggataaagtgggtcaccgccagttaaggtaagaccttggatatacgatttgcttaagtgagatgcaatttctttaacggtattcatagtgaatagctgtccgttacgagcattccaagtagatttattataacacccttcacatttatgcaaacaccctgtgacaaaaagaacgaccctgcatccagggccattcacgaagtcagaagggtagattctgtcgaaattcattgaaccttacctcattacgtgcttctacttctgcatcatatttccagggttcatcagtttgaatagccccagccgataatccactttcggggtcacgggttatagcaattccaagcgggtgcagaacctctttgttgattttccaaatcaatccccattcgctaagttggttccaatcaacttgcttcattggtttctctaacatgttttaccctatgcataatttctttgttcttaccaagattgaacccacgttcagaaggattaccaagatagccgcaagtcctacgaattgtattcattttctttggatcagtttcaccacaaattgaacacgtgaatccgttttcagtaggtgtcatctcatgagtagaaccacaagaaagacatttatctactggcatattaacaccaaaataatccaacttctcgatagcatagtcccataccgcttcaagaccttcaaggttgcgcttcatgtcaggaagttcaacataagaaatatgaccacctttagcaatagaatgatatggtgcttcgcggtcaattttttcaaaaggcgacaggttttcttctactgacacatgaaaactattagtgtaccagcctttatcagttacgcccttaacatcaccaaacttggcttggtcaatcttacagaaacgatagcacagactttcagccggagttgagtacagactaaaggcatagccggtttcttccgtccacttgtttagcttagtgttgatgtacttcaggacgagtttaccgcttcctttaaaagtaagcatatcaaattcgtggatgccaatatatcctaatgaaattgaactacgtccatttttgaatagctcaagaatttcatcatcaggtttcatacgcacaccaaaagcaccttcctggtaaagaataggagcaactgacgcagtaacaccttcaagtgatttaattctagttaaaagagcttctttacaaatatcaaggcgttcatccagtagtttaaacagtttattactgtcatctgaacttttataatttgcatccagagctatcctagggaggttcagtgttactacccctaggttattacggccatcaagaacgggtttgccagaagagtctctccaagcaccaaggaaacttctacagcccattggagatacaggagtttctgaacctgtaattgctctattatttcgagcactgatgatatcaggatacatacgtttagctgcgcattctaatgcaagctgcttaatatcatagttcgggtcttctttacgtagattaatgccttcttctacaaacatcacaagctttggaaagattggagtaattccatcgcgtcctaatccacgaatacgattatcaagaatagctcgttgaattaatttttcttcccatgacgttcccataccaaatgtgatagtcacaaatggagtttgtccgtttgaactgaacaaggtattcacttcatattcatatgcctggaaagcatcaaatacgtctttttctgtttttgaaatagcataatcttttactaatgctacttgatatttgcgtgcatcacgtacatgtttagcgaatgtcttctccacataaggagccaatactaaatcgacgttagcaaacgtagttccaccatactggtgagatgctacttgcgcagtgatttgcgccataatagcagtagctactccaatactcttgggagtttcaatttgagcgttaccaagtttaaagccattctgcaacatacctttcaaatctactaagcagcagttagtgaaaggcaaagctggactatagtccatatcatgaaaatggataacaccttctttgtgtgcttccattacagagaaaggaatgacctgattggcgatatgtttagatacgataccagccatcaggtcacgttgggtaggaaaaacacgagaatctttgttagcattctcgtttaagaggtccttgttggttttattaataagtccctggatttctaattcgatattcattttaaactcttacgaagctgcttcttgtattttgaagcaagttgtgattttccatcactttcctcgtatgtaaacccatgcaattccatttcagcaatcatctcaggcttaccaagacgtgaaaagcgtttagccatatcggcaacatattgcgggtgaatattactgtctttacgattctggcggagatagaccagcaaattctctaaccattcgaggtagtcaatatcttgaccttttaaaccagagcggttgaacttatgcttcatttggccttctgccgcattacacaggttacagagcaagcctctgacctttcctgcattgtcaccttctaacgcatggtcatggtcgaggtggttcttttgaatatcctcatctaaaggacgtttgcagcaaggacataatccgttctgtgcctgatatagtttttctttttcttctttatataacttaccggttaataacatactcttacctcagcgattagataagagtatttatagctaaattaacgagtaactactatagatgttatgattagactcttttatgcagaaagaagtacagaaagcatagatgccttcataatcatccgcattgaactcaatatatgaattagtttcttcatgaagaagactcattttagtccaagccattccattgatgtcatcgtcgtaatagcctccactaaattctactacatcgccaacttcataccaatgactgcgtaaaatttctcttgtaacacgatgaatatcagcgaaatcgagaatttttactgtaatagttttagtaatgcacgatttagacatggcgaactccaagacgttgttcaagtgcgacaatgtaatccgcagctttttgcattaaatcatactcttctgaatcacaattttcctgtccagcaaaggcataaagagctctggtaattggaacgattgcaccttggaaatggttaagtttaatttcagaaatcagaggaacatcttcaccttgaccaatttctttaatttggtgcatcgtatcttcgctgtagaagcaccagaaccaagattcgccatgtggagttgggtcgttaatagtaatgattttgtttgtcagcaaatcaattacggcagtaattccacacatttcaaggtcatcttcattaactacagaaatgacttggaacttaaatcccggaataaacacaggaaattgctctgttaattcatcatcattaataatgacttcaaactgcttaccaataagtcccattcactttgtcctcataatcaagtaattcatttatagtgggttcagaggtattataatcctcttcaggaatagcatcttcctctggctcgacagtttcccagcgagccgcataccagggttttagacctttgctactttgcatggtgttggttcagaatcattagcagaatcatgttcaatacgccattcaacttcagtgcgagtaaccactttttcatgacgagtaacgatatctacttcaggaggactataataccaatcagtatgatatgagcctgaacgagattctgataccatgaaatgaacgccacgcgctggataataccaaacttgagtgcggtcttgatacttgtgctcttgtgtccaatctccatcttctattaaaacaaagatttcttctgcatcatcgtctggtgcattaggcggatatttaaaatcgtagttgtcgtcccaaccgccagtgacgccagcgatatgcttgatttcttttactaattcagcgttagtcattttaacctcgcagcttctgtaaatcttcatcatcaatccagctttctaaaccggatggaagcgcacattcaatttcccacagcaattcttcaattgcttgcaagcgttcaagctcttctgctgaaatagttaccatgcgtggagcttttaaatcgccaatatcataactcatagttcttcctcgtgttaatcataatttaaccatgcactcgccgtatttccatttagacataactttaactccattagagtaagttacctctacctttgctcgatgatttttgatttgtttaatctcaccagtttctaatccgccatagccataataaagagctacaatatcaccctcccgaaggagggttccacgataatcatgcattgaatttgaatttacggagttcatcaaaaccgccgatatgtgtaccgtcaggagcaaaaatctgaggcatagttaatccaacctgtgattcacgccccaaacgacgaagcaaatcactgataaccacttcatcaaatacacctttttctggcattacattgatgaatgcatactcttgtttcttaacatcaagcaaacgctttgcattatcgcaaaatacacacttatgaatgttgctgtcgtaaccaaaaaccgtgaacatcttcttctatttccttaaatacttgagcttgaacttggttccaatctggatggcatactgctttaacgtaatttgtcataccaagacgcttcattacttcgccatcaattgcagcttgggcaaaatttcttccacgggtcatagctcctttgagattggaactgttagcaatttgaccagtctcattataataaaccgaatacatgagtagcattactcgttcagcttcttccatatagcgtttgcgtgccattttcagccttagtagttataactaatgttttaccgtctaacgcatcgagaatatctttgatgcaattatctggcattggttgaacgctagctaattgcttggcaatatcatcaggaattcccatgcgaggaatatttaatttgctaaaatcaattttatccattagcagttaccgggaagtgttctgccaatttagcggcgatggcagcgttaatttgatcagcgaaattcttattcattgcattaacaatgatttcttgaattcggagattagctctttcaatagacatcttaatacgaccttcagcttgcttaacagcgtcatcaatagtttgacgaaccatatcatcaatagcatttttagcgcatgattgggcagcgttacgcatcatctgtgacatttcttctttagcagacatatcattccaaccacgagtatggaacatctgctgaagctgtttcttaacttccgctcgaacatctggaatagttactgttgcaatattaacttcagattgtactgcttgttttagtttattctgggaatcttttaacaccatttctttaacgatgttattgattactgactgctgcagttgagcacgggctgctgtaccttctggaaataactgtcgtactgcatgtgtatctaatttaatgtcaatcattttacctttttcactccaggaatattagagatagtttcaaatacttcgtcaaagttatctttatcaacagtgactaccatagtgcgagcggtctgtttctttttccaacgtttaaagaaagtttcaagactcaaatcatgggaagtaaagaaatcatcggttttgtaaacatatccgctttcaatttttactaccgcatcaggtgaagggtcttcatattcttctacttcaacatcatcaaagaggattaaagtgtcatcatgataatagccttcccagaaggcttcatcgttataaaattctttccaaagtgcgccagtggttttcatttaatcaccttcttccaagcttcgtgagcagcacacgctaatacttcgtcatcagtcaaattgaacttgccttcattacgacgagcaatcatttcattgaattcagtatcagttctaagcatcatgttaagaactgtaaaatccattgtcgctcgaagatattctttaagctgcatagggtcgatgccactttcgtatgcgtcaagaatcatatctgcaatgatgttatcaaagtttttgtcttttatgaggttattagcatactcgacaaaaaacttagtattagcaccagtaatagttttagtaatcattttaattttctctcaaatttatgcttgcaagtccgacatttcattttcagaatatcggttgtccaatcgacaagctgtacttgaatactaccacatttttcacaaggcacaacttgtttagctgcagcttctcgacggtctaccatttcaagacaggcatcccagtcaattttaaattcaggtgcaggtggatactcaaactcaatttcaaggtcgttatcatcaacgaccatgtcttcttttaattgatttttcacagtaagctccgggcatactcgagagattcataccgctctttgtactcgttaagcgatttgactaaatctgccatcatcaattcatgtttagccaattcagcttctttggtatcaataaaccgcttaaccgattccatttcggcagtaatactattcttagcgatttcaatatgatttactggtgttaacggaagaggcttaacaacattgagatacatatgtgctacatcttcatcaataactggggtggtgctcaatgttttaggaaaaatcttaaatgagtccaaatgtacttcaagaacagatgagttttcaccctgttgtttgcaacatgattttttaactacatccatatgctctaatgcagtacgaacttgcgctaaaagcgcccgagccggatactttccgctggacaaatggctattaatatgaattcgtacagttacattgtcaagttcttcggcacgaataaatgaaacacccttaggatttctagaactagtagaagatacctggtatttcacacgctcatcgcctttaagcaagcaaattgaacgattaagaatacggcgtaggtttgcattaaattcagagcagaagatttgagcagcgctgcggtcatgtctttcttcagttttaaacgcccctgcagcaaagctataacgctgaccgtaaattttagcattgccgatagcaaactttttgagctgtttctctgctgacattgcacctaaccaacgagaacgacgaatgttttctacaacaaaaccagcataattggcttcatgcgctgccatgctatttagcacacgccgagctacattaccagcaattgctacgttataagcagctggatttaaatcatgtaaagctgccaaaacctttacgtgcttctcacgctttgacagtccttttctgttgtacttatcaaattcaccggctacaaacatctttaattcattcttattcattatcttttcctctattttggactgggctcaaagagtatctcaaaatctccctaaacccattatacaacaattattcctcaagcattataactttgcttgggcgcttatagaaagcatgagttttatcatctttcgctaattcaaatgtagcagtaaactgtactttgcctctgtattcaaacggaatactttttggaagggagccgtaaaccgtagctccattctcaagcacaaccatcatcttacattgtacgccgtaatagtcttcataaacttttactgacgttacggtaccagagacagtcactcgtccttccggggcatcccctttattcttattcagctcattgaatatattatcaaagacctcttttgaatgttcctggatagcctctaagatgctcttatgggctctaacttctgccataacaacatccgttccgtcttgcaatttccactctttatatggaacgcgtacttcaagaggataaccatactcacgaagttctttgtactcttcttgagttaagcggattttccaccagccgtggtcaccggtatactcaggcttatccagtgaatcaaattctgtaacatacggcaagtaactgcctgcgtgataagcttcaacttcacctaattcattctcccaaagataaccatcaaagggagcatgaggacgatcgtctttgccccaagtaggagctaccactttatcaaagtattcacgaccgaagcgggtcttcgcccatccagcattcaactcctcggcgcgtttttcaactttcgctcggtgtgcttggcgggctacacgattttcttcaacaagtgcagagataatctcggttaaagttttcattttattctccagtttggttgacgagaccatcttatcaacagcctcgccgaaagtaaactactttgtgaaaaattttctccaaagcagaactgcatctctacgagatacttctactgctcctagagcaactgcttgcttgcgacgaacatcgcgcaaatcatagtgtggaactcgcttatcctggaaccaagaacgtttcattccgatggcttctgccatagcgtgtaactcatcaaggttgtcgctaaacatatgacagttctttacttgatgacctctcattttccaaccatgattcatcaagacatctacgtataccgtcatttctgattctcgatgtaagtttcaatgatgaactgtgctaaacatagaagattatcttctgaaggagaatctactaaattctcaaccatttcagaaatagttccaaaagcttcttcagtattgaacatttcttgaagttcgttccaagtaggtgctttcatttcaatctcctcattagttaacggaagctatcttatcatggcttttctaagatgtaaacaacaaaagggcccgaaggcccttaaaaagatcggaaatcactgttaaaccatggcgactggtgctgtcggcgcttaagcaatttcagttggtatttcctattgtcttctataatcatcttagaggcttttagctcttcagccaatgagacctgtttacggtccatcaagatgaggttctgggtcttctgggcaaacgtctgaatacctttgagacattccacagattcctccatccctcgtttatacttggttcgggcagcatttaactgcccttcgtaatacgcatgtatagacactatagtactaaacaccttttacctcaataacatctaagataatatcttcaacgtcttgctcagggaatgccacgccattggtctgcccatgctgaaatactgcttggtacgctgacggcgcagaaattcgggttgaacgttctttattgtcatagcatttgccatcaataaagcgtttaaatttaacttcataggtttttaacattattacaccttagcataattgacgatttgttcacgatcagcgggccaatttaaatcagaacgtttcttgtttgaccatgcaatattttcttcagcccaatgaagtttagccgatacgctcttttgtacgtctctgatggcttcttcaagataaatgcctaaatctctcgggttagttccttgagttttaaatgcattgagcaaaatatttcttacgacttctttaaattgattttcaacttccgggtgaataaattcacgataaccgttgcacggatatccaaaagcatctaccatacgagtagtactaaattctttgttcataatccgagcgcctcgcgttcatcaggatttaatttcgccaaagcggcttctttaattttttccaaccgtttacgcttagcttcaggtgtttcttcctggacggtgatagcagcctttttagggaatgtccatgattcgccattttcatcggtgaatgtaattagttccgttggcttacgattaactgtaccatctgagccccaccaagactgccccttaactgcttcttcggcaacgcaatatgaaccataataaccaaacaactcactacggcgatcgtctggtgaaacatacgctgcataggcttcactttctgtcattacccatttcattttagcacctcataacgaataagttcaatacggtttttaagctcttggtatgatttacgccaaggcttataataagcatttaaatcttggtgctgtttatgcatttcgtctaaatgctttactgcatcctgcacatttgcaaggaaagtatcaaatactttattagcgtattctttccttagctcaatgaacggaggagcacgaaatacgtttaccattacacgtagttcatgataagaagaatggacttcagctaatacatttttcttatcgccaaaattaaacttataaagcttttcacagattgcttcacaggttttctctgctttacccttgggtttacctgcaaagatatgaccaggcggatatactttaatatcgtttaaccaacattcaatatctttaatagctgctaaactcattgtacccacgctccattttcatcaatgtaattaatccactcgttaatagtccaggaagaggtatcacctttaggagtatcagcgatatacattccgcctttaaacaaaacacgttttacatcattagaaattaaagtagccattatattttcctcagttagggaggatttctcctcccgtttaaattatttcagcattgttacttcagcaatttcacgccagtttttacggtcagtcgcaacgaaatcaccaatataaagagcagtacggagagatacattacgcagacggtttacgttatctttcataaattccaaaacttcaataacttcggaatttcttaacccacggttctgtaacatagaagtagtcattattacatcttgaactcggaccataatctcttcattagtgtgaacaccaaggtcaagataaaccgaacgtgataccagagcttgaagatgcggagcaagtttagaaccgcgctctaattcacggtcaatatcaacgttagtgataaagaccacagtaccttcaaactcaaactcattaggaattcctttatcttccaagaaagaagatgcagtgctccagcaaaccttacgtttctcccctgaatccaaagcagctttcagaaggttaagaatgtccatatcagagaatacatccacatcgtcaataagcagaactgaatttgcttcacgtgattcccagagacggcagtataaaccaattcctgagattttaccgttcactgatttgtaatcaatagcgttagtatcatgggcatgttgtaatgctttatccaaagagtaagtcttaccgatacctgctgctccggagataatcagagaacgaatattcccatgaattaagccgttagtcattaatcccatgacgttaaagcgtttcttgatacgctctttcatttcatcaacggattcaacaacttcaattttagcagctactccgtcaattgtgatatcatctttgaatacccaaacaccacgctttttgccattcagttcaacaaagactttaccatcaccctggcgagaatcttcagcacttaagctatccgggaaccactcaccgagtaactcataagtacctgaaatctctttgccgaagtaaatccctttcttgatggtgatagttgacattttattctccgttactctgttttgttttgatagagctatagtatcaccagctcgcgagcttgtaaactacttttttcattcttttgaaacaaaaagaggagcccgaaggctcctcagttatgcatgcttattgatagcattttctgctatacgttttggaagtttacctgcccagcggaagaacatgataatcgctccggcaataaacgcagggaaccaaaagatgagataaaaccaatactctcctgctttctcgatggttccatttttgattagatgcttacagacagaccaacccacgacaaagtaaattattgcaacaacgattggcactactacgctccacagtaaaatcatatttcagcccaataaagtgagaaccggagctcttctccggcccatgacataaaacgatggatttgctttcgagtaggacgagcagaaaatttagcattctctctacgaccagtctctctgcaaactgcttccaagtaccaccgtctacctttatgaggtcttccataattcaagaagaccttcattgtatcatttgtagaaagaattgtggttttcaagataaaccttctcgacgaaatcgtcccagaacttcatgtctactttcttaggcagtccgttcttctcggcttgatgagccaggcgttcaactgcgtccacggtcgtttccaaaatatcctgaacttctttgaacggtaactcacccgctttgattttcttaatcaagggagcctgcgctagaggatacttaaggtcaccggtggaataaatttcctgtaactgaagaccaccgcgaagggcatgactcagcgctttccaatctacaccttcgttagcttctgccttacgagcacgttcgccatattcagcatcaagcttctcaagggagtacttcatttctttaactgtgatagttgtctggaatttacgacctaacacattatagaaatactgctgacctgatttatggtctgtaaaggtggtccactcaaggaattcacctaccggaagacgatcggcgatgtccttaactttccaacgctcgttaatgcctttctgcttgggacgatcgtcatatttccactcaggaatatctcggataacatccaggactttatgcaaatcagctaaacgagaacccttaacgccatacttacctgcttgcttacggacatatccaagataagccttcatgtccgtggtatagaaacgagctcggttgtcttgaatgaatttccatacttcaggaaggtcagatgcaactaccaattccggcggagtatgcagcatatccaacgctacagtttcaccatcagcagcgagcttgaagaaatactttaagctgaacagctcatggtcaatatcgtctttggtatttttggttgcgctgttgttagtattacgattggtgtggttcatcgcctgacacattagaatatcacgcggatgaggcacaaagatttctttaaaatccacatccgattctggagttgaagtaccatacagatgtgaaccaaaataagattttacgattgttttcataagtaaatatgattccctttagcgaatttaactaatgcattagaacgcttggctgcttcttctgctcgagttttatctgtagttctttttgatgtacggtaaacattaccaattttttgactggtgtaataatacactacctcatgagtatgatactcttgtccatcaggatgctgctcacgacaagtttcttcacgtaatgttgtttcatacataggaactaatgcccaatcaattcctgtgctaatgattgccacctgaatgtcaagtctgttccagcgaaatgcattgatatatcctaggacccgtgattccgggtccatcattgcgaatttaatgttttcggctgaagctagcggcatttgttttacaatactcatactaagttttttcttagtagttacgatttcaatttccataccccgccttcataatatatgtctaaatcaatattatcttttccactatacctgccagtcagtggaacgaatttaacacaaatcttttcgccgtcatcaaaagtaaattcagcaataggatatgtagaaattataccacgttcggttttagcacgaaagacggcccgaaggccgttcacgatataaacttgatcattcttcactgggttcacctactgtaacatcaagcatagatttaacgagcgagatgtcatttgtactaaacacgtgagcttttcctttatcgttctggcaaaacatgcttccatctgctgcaattgctagtacttcatagcagttattagttgtagagaatttatcaccaactacaagaggaacattaactttacacttctcgtaaacggtgtatttaaggctgctgagattaattaccgacttagaactacccggtaaaagtttgcagatataaaatccatcgtctgccgattcatttaggtaatcatcgatatacattccacggtagccgtcttttggatatactacagtagttgtttctcggctgctatggtcgtaatatactacgattttggtgtctttacttttaaagaaaatcgatgctgtatgcgctgagctacatttgaacgtagaaataaattcaacttcaagctcaagccgattactttgattgtcaaagccaatttctactttatcacctacctttaacggcttttcaacaaggctttcttcaaatttcgtgcgaataaaacgtttcatttatcaccttctacataatcaatcattgggcagactttccgcttgcgagcttttaaatactggacgaataccgacggttcagcttctgcaggaagaccagcttttacccgagcgagtttcttggtatactttttctggatacggtaatgtttaaatttttctaaaccaaaaataaatccaaaagctatagctgcaaacaaaagcacaaatgctgctataaccgctgcgccaactggtactgctacaacgtttaaccaaaacgcggataaactaatacccatccaagcgagaattcctgtctctgccacaatcggccaaccgaacatccatgcaacagaaccgatgaacgtgataatcgccgaagaaaacacaacatgaagaactgttgtccaaaagtatccgcatagagtttttggcattttccacatgttgtcagatttaaaccacaggttcattttgaaatgccaagagtttttattaatattcattatcagtccttcatagtcggaatcatagttacaagatattttacgagctgttcagcatcggatttatcaatcatcaagatagtaccgttgcgctcaatttcaataagtgtagaaccgtatagctctacagtagtcagatgcaaatcattaatgtatggactttcgtcctcaattactgcatcacctttgcgggattttccgtcccatactaatttactcgccatcttttgcctctatcaagaattgaattaatgaatcaatttgtttagtatcaagatgaattatatcattgccttgttttagcacgatacgactcaactttttagtgaaatacgaattcacaacctttacatgcacatcgctgtacggattatctaaattggtactatcaagaatactttccataattacctcaattgtgaatcttttgaaccacgacggttataagcagaagtcattactgtatcccactttccttggcattctacacaccgttgacagcctttaaccaacagacgacgagctactggaatttcctcatcacagtcaacacaaaactcttcggattcgcgctgttcttgaagctgtttctgaagacgagcccattcaatcccatctgctatagttgcttctcgagtggcgaatccgtcatcagacggaccccagccattcatttcaaactctccagaatcatttgcaccaaattatatgtaaacatcggatgctggtattgtaccacaatgtagatgataagtaaaacgtttctcattcttcgccatcatcaaagtcgtagtagtcgtaatcacaggaatcaagataagaatccgcaaattctttctgccgacgaaaatcctcaataggagtcagtctgtctgcatacgcttggtcatctggatcgctgaacttatcttcttgcagttctttaatgaactgttcagcttcttcacgtgtccaaaacccacgattaagattatgaaccgaacgtttttcacctggcttgaatacgcccatatcatgagcagaacgctcagttgaataactttcagtttggccagcatagttttcatattcacaaatcaccttgaagaaaggagattttcgcgaatatacaccacgaagaccaagttctacatcatatgtgcctgaagcaacaatgtaacgcgttatttcgccggttttagtttctgtgcgattaacaccacacacgtgataaaagatttttccaggctgaagttcagtagttaacttaatcataatgtttttctcgtttggttgttgatatgtctatagtatcatgtaatgaagggaagtaaacaactttttgaaaagaaaatgcctcccggaggaggcggagggtattactgcaatgataacaaatacttagtcttgtagcatagacctgtaatgtcatccagaacactttggagggcggcaggaactgacttgtagataccatcggccttagctagaatgaggtctagcatttcaatggtgtcctttggcagctctttctgcgatggtaaagccggtgtataactcttacctgagaatcctaaccactgctcaccaaaagcatctatcaaatctggaatctcgttaaagaaaacttcatacgctttatgtctggcatacgatttggtatcaaaatgcgctgaatgaaaatacgcctgagacgccataagtaaaccgatgaattcatcttgtggagtaagtttaccgtcctttacaaaatcattgaacttcattatcgagttgtatcctcatgctgttagcatattcttcacctgctgaacgtcctaaagaatcacaatctttagaacaagactcgctcttccatttactttgtatgaaagcatagaactgttcagactcttgcttactaggctccttaaatttagcataaacttgtagagctccctcaacatacgagttataatccgaaatgtcgtcgtgtgatgcagctgggaatgaaatcccgcagcccaacaccagggctaagcaaatgtgattaaaggccatacggcctcctattatttttgtccagtattacgtttgtgctgaagtacagccttaacttctttgaggtatttttccagcttacgtttacgggtataatctgcttttgaactatgttgacgaatttcttcctgaaggtgcgaaataccatgcccaatctcacgacgaagttcgtccagttgttctacagtaagattacgaagttgcttttcacttaaatgctgcatatacacctcatcagttagtaatagtatttatataagtatgtgttacttaatcccaaagccattcacagatgccttgctcaatagttctagcaccggcttcgtcccagttatattcttcgtcatacttcaatgcgcgtttaatttcggctttatgaaatagacgtgggatcggcatagcataacgggtccaacgtagagttttccaaaatccatcgcgctttgatttagcaatcagtttcttggcctctagcggtctttcccgattttcagaaatacgcagttcaacatatttctgttgggtttctttatctttctgagttttaacgtatttgttatagcttttaatataagcaaattcgttattattctgatcgttccatttggaagattttactacatgccagcctttacggcgaattgttctagacattattacctcgttaagttaaattacctcaacgatagtaaaatcctgatttaaaaaatttaatattcatgaatagattaccttacatttacattttggacattcaggttctttattcttaagacgcttggtagctgtctttggagcagtgttgtaatcatatacatgaagacaacggtagcacatcacatattttttcatattaaaccatcaacgaaagcaatattacgtatagtaagaacccaatcacgagtactaatactataccacccgctatagcaaataagctactcatgtttaatataacacccattcgtattagcaataaagtctttaccctgtgccaatactttacattcggaattaagacgattttgtgcttcttctcgtctatcactttgtatagatgctgccacaccaatccaaatgaatagcatacctacaattagcatcaggatagtgttatacgttcttggcttcattataaacacctaccagttcgcaccagtgtttacgacaaagagaaacgtatttgtcttcaccaccaagttctactacttcaccatcggtaatagcatttccgttttcgtcaatacgagctaccattgtagccttacgtccacagtggcaaactcccttgagctcaacaagtttatcggctacagaaagaagagctttagaaccttcgaataactcgccgcgaaaatcagtgcgaagcccatatgccattactggaacatcatacaagtcaacgattttacatagctgaagaacatgttcagcagtcaagaattgtgcttcatctacaaatacacaatgaatatcacgttgtgtttgtgcccacttgaaaaactcaaggatatcaatagattcgtctactgtattagcttcatgacgaagaccaatacgtgatgttacctcggtggcagaatctcgagtatcaatagcaggtttaagaatgagagttcccattcctcgttctttgtaattatgcgccgcggtaagaagattagctgatttgcctgcattcatgctcgcgtagttgaaataaagctgtgccattaaagtgtctccataaaatcagaaatagcattcttagaacgaatgagttcatcgtattcttcaggtagaccatttccgtaaatggcactaatagctactacttgctcagcacctgcataatcatcaatcaactgccacagtttagttttttgctcttcagtaatcatctatttacctctaacaagatggatttagcttttggcttcttcatattctaccaccataatgtcaatatcaggtgttgctaaattgattaatttctcaattagttcccaatcaccgccagcaataccagctccaatttttggaatgtatagaggacgattataaacaatacggccagaatttagttcatggaatgcattaaaaattgcgccgtaatcaacatttggacctggagcatactgagtatacaaattatagcaatatgcagtgccttttttgtgaatggctcgagtatgagttccaagcttagctaaattgttgtcataataacggtcttcatcgatgtcaatatcgagaattggaggatatgctttagcaagttgtcctgctacaccagcacccattgtagtaaagcaattacatccatgagcaatatcgcattcatgcttcatgaatagttctacaatattacccttgatatatccagtaatcatttattcacctacggaattttataagttgcatattcattaagattattgtatactcttaaaaatatagcattgttgcaattaaggatagggttcagcactccttgttctttaggatgcattactccgtcaatagaaacgccatcgctctgcattccacatccacgagcattatattcgacaagtggaactattacctggtcatctttatcttgataattataaaatgacattagcaattttctactgctaggaacaaatgctatttcaatgttgttcttgaatgggccattgctttctattttagtaccctgtgctgcaagtacagtttcaggatagcctgggagcttttcccaggcattaactgaaaatgcgcagcataataaaacagctgcttttttcattttgacgatagtcctgacatataacgagccattaattggtcacgatacattaaacatatattttcgttaggagcattgacacataaatctttcatgctcttagccttacgatttattagtgttgtccactgggccgggctacgtgaatcttttactccatcgctgaatgctgaatctaattcaagcgctaatatatcaacacattcagagttcgtattgcaaaatgttttagcgatacgaagtgaatctgtcattgaattttcagcattagcagagaatgccaataccaatccaagaagcgcggcgtactttaccattattccacctttgtatgtagcattttatgtttctttaagaaattagctttctctaggacatctgacgcataagagtttcctcttttgacattccatcctgcgttataactagcaagagcttttcgcatattgccgttatgtatatttaaccaatatgaaagctcaatatatgcccattccgcggaattctgtctagatttaagcatttttcttatttcagaatcactaaggtttttgccttctaatttagctctggctttaaccgtaggcaagtaattttgaaataccccataagaatgatgcccctttcctgcttttaaattggctcctgccgaagattctttccatgatatagcagccattatatatcctaagccgttattatcatatcggttatgcggagatttttcctttccggatttttgatattgttcaccaaaattatatgcgtaatgcaagttgtcaagttgaacattactgaaagttggctcagacccaaaggccgttgaacacaaggccattagaccgataagcgcttttttcatgtttacctcaattaatgtgtataacttttgtgctgattttacctttcaaacgtttatcattaacgaatgccatacgacactttatgctaggtcctttccccggtcttggaatatccatagtaaaccctagccacagatttccatccgtaatttctaaccgcattggcttatactcgatgttttcatcaatgtcttttgggtcaattggaagccaaggcattgctaagaattcattaatttctttaagatgattaggaattttggaaagaacagagaatacatactcttcatcaatttcacgttgaatagcacggtccaacaaatgatcagagtacttagtgaagaaaggctctttaccctcggctttcgcccgggcacgaacagataaattcaaagagcgaaaagcttcctcaaacttacgacgcagtttagttctgcgaatgaatacttctgggttagttgacatagttcattctcctttgtttgtagggccatagtatcatggcccgtaaggaaagtaaactactttttaatatttttcttctggacagaacactgcccggcaagcccacatagaagcttccttcagtttctgttttgctgtacgaatctgggcaatacgttcgtatgcttcatcgagtacctgcttgggttcattggctgactcttggtagttgattaatgcctcttcttcaagagcagtaaagataagaccaagacgggtttcagcgtctttgatagcattcactttaccaattttttcattggtatgtggcttgtatcctttaatatcttcgattgacattatagtgcctctgtgaaagtacgagcgataacgtcgcgttgctgttccggagtcagagagttgaagcgtaccgcgtagccggaaacacgaatggtcagctgcggatatttttccggatgctcaaccgcgtccagcagggtttcgcgacgcagcacgttaacgttcaggtgctgaccgccttcaacttttaccgttggctggtattcaatttctacttcacgcgccttgtagccataaaaagtttcagcatccgtaatagtatcttctttaagaacttttgaaacgattactcgtgcgtcatcaccatcttcgatgtaaatggtgcctttaagttcaccttcaagaatttgatatgctttcatatttcctcttaattagattctttattccaaccacgcatgtacgcggtaattacgtccatagtattccactcagtagaatggaacttggatgcagcctgcaagtacgagattttaccttctggcattaattttacccgtgctaaacgttcagaaatagcagcgtctttccatgtagcaaaacccgttggtccttttaattcttctttaagacgaataacttctgcttctaattcagattctcgccataagcgttctctggcatcattagcataaagtatttcttcatcagtttctttatcgtactctacaatttcaataggctcatcaactccatatccacgagtgcctatatacgttgtagcttcttcccactgttttgtggcttcattccaagttccattctgatgagcttcataaaaatcttgctcaccagaattactgaaccaatcacagaagctttcaactaaatgtggaggacactttataacaatttcagccattgcattgttttctcttgaatgcgttggtcatatgtgattaagcttgaactaatcacgcctttgagcttgccagatataaactcaattctaaaattaggatagcgattcatccacttcgtgttaggagcattagaaatgaattctgcacctttaaacggaccagacagaaacttgtagcgcttgtactcaagcaggtttccagccgtaaccattgttattaattgcttcatatcggaaaatcctgtattttccattactgtaatcatatcaacaatttctgtctgtgtcatcattgcattcctatcacgaaaaataaaggtaaggtatcattaggcatagaccatctgatagcttcctggtacatatcatagaacttcatcatatcgggaactttcattggttcttcaatgataattaatgctcttccaaactttcttcctctaaacttataagaggaatcattggatagaaattccctgattgtcatcggaacaattgatttagctatctcgttagccggtaatttattaattaaatgcgatgaattatattctcgtagaataccttccatcagttcagatgattgtgtgtatcgagtagataagattataaccgaaccatcttcaagcaaccaatcggtagcgaattggcataaggctgcggtctttccggtttgtcttccaccgtctagacgaagggtaccgtactctcgcataaggcaagacggttcataaaaactgtagttgggattattcaatcgtctgtctgcagcgtctctgaaagcatgcatcagggtcaaataaatgggagttaagtgtttcattttagattccagttaaaggggccattccttggcacatgtttaatccatcgacacactatgtaaaccccttaccgcacttgggctcgaccttattacaggtaggaaaagctacttcactcagaggactcgacgttcatgaggagaggtcgtgttcggctttattaggaaattgcttacttaattgatttagcgtaacgaatagcgccgcgatcgtttacgaatgcaattttaccattacgcatgtacatggtaacagtacgttggtaaccgttagaagttttgccagactgataacctactaatgcaaagttatcttcaccaggtttgttctgcttagacttaatacgctcatgaccaaatgccattaaggagcgtgcatcgccagatgctactgctttgcgagaagactcatcttcaatagaagaggtgaaatcatcgaatgaatcaaacttagcatggctcttattatataacttgccgtctactacgtagttatatccaacaacgtccatttcaatttctgtaccatcttctagcgtggctgtcatcttctgaccttttttaaatttcagaagattacttccaacagattcagtcattacgccaactgttgctaaacgggattcatttaaaaattcttgataagttttcatttattttccttgataagcggcccaagttccggtccgcatagtttcaattacacgacgagcacgattaggtgtctgacgataccaacgtgaatttgccagttctttggcagcagcatcccattttttagcagctaagagcttcatggaagcagggaatccagcgacaccacctacacccatttggaataccatgttaattagagctgctctacgaacatcatctaatatattatataccgggcttaatgtagcattagccacaatgcccttaattgctttttcaacatcctttgcaaaaattacttctgcctcagcctgggtaatttggccaccagtagaacgacctacaagcttgtccaggttagaaatagccaaagattttgacgggtctttagtcagtaagtggccaataccaatagtccaatacccttcggtatctttataaattttgctatcgtatccttcatcaatacgcagcatgccaaaaatatccataaggacctcctattaattataggagtatttatttggccctgcacttggctatgaataattcaaggctacacttctcgtatggtgtccatttacctttccaccacacataatctcttctatcgtcctcgggcaattcactaaatcccggatatagctgttctgctatataatatgctgattttgtatactcgccgtcaccgaagacatatcgtgatttcattagtatacgcgacattttatctctaggatgaaatatgctaacccattttccatcgtgaataaatcgtagctcatgcttataaatgtgtggaatgcctaattcaacggcttcttccataataacctcactgagctgtgctatacatttgtgtcatgattttatacaaacttggtcccatcacatatttccattgagaaggtttaattaaagcaaatgcgtcgatttccgggaaagaaattccattttcatctttatggtaagctgtgcaacagcaattcttaaacacttctgggctcacagggagcatatatccaaacaaatggatatccttattgctggcataatcatgtcgtccgaggtcatataagaggtcctggtcaaacccagtaaaccctgtttcttcctggcattcgcgaatagcagcttcttttggtgtttcaccaggctcaacatgtcctttcggaatatcccatctagagcctctgccctggacatatgtatttgtcatacgacccatgaaaagccgtttgtcatcggtaaagaataagattcctgcactgagctctttcattggcattcattccaactttcttcaagaatatcttccatggcagtatagaccatagactctagtacaccatcacaattatatgaaccctctaccgagaaatcacagataggtccattaataccaagcagttcttctttaagtgaaatctcgataccgctcagtgattcattatcgctgtaacacagaaggcgagtatcaccattttcaaattttacatgcactgcaacagccattatttcatctccttaatccaggataaagtttcattacgagaatcatctttagatttttctttctttactttgggcttatcaaatacaccccgctggcgctgggaaacgaattgcaaccaacgagcaagcattgcaaaccaagttccaacacctgacatccaacctaaatagaacaaagtatctccaaagattggtgaaaagaagtaaaaaccccaaaaagtcccaaatccaacaaaagctgaaaatgaaaaccagataagcagaaataggaaaaaatacccaggctcatcgtctttaatcattccacgataacaagttttaatcattttctgcagctcctaatccaggtgttgaaatcttctttttctttccacttcttgtatttcatacggtaagctaaaaatgtgcagcaattaatcaacgcgataattagcatccacatgaggctgaatgcgaaaacacctaaaaataaaagcataatcataaactctgagacgttcaatccaaagaatgtccctccaacaattacaaaagcacaatataaaatccatgtcacgattccaaaagctggcgccagaccatcttggttccaaaacccgtcaggtttacattcattcattttcttctcacctctttaataaactcaaacgactttttgcggttccattcaagagttaaattcttgcactgttctttccattcggcctttcgttcacagttatgcttaacatactttacccaacgaaatagttcaattaatcctagaccaagtaaacctattaatccccatgtaagtaatattacattcactaatgatgtactgctaatttcagccaaattcattacgtcaattatgataagagttatcatagttccagcagcacagaccatccctggaattagaacatagtcagtttggtcaaatttatagacataattataaacgggaggttcacttggcagatataagttactcatttctgcaccctctcacggcagtatttgataaattcatcaatgattaattgtttgcctaccatgttgttagagtcaaacatacccatgacttttggtggcaattcattaacgcagtaatttaaataattgctataatcatcctgagatgtcacgtatttaaccaggttaataccgagacgataactagttttattatagataatctcaataattactgtatatgttgtggagctagaggtaaaatacccatcagcattagcacgggctgatgttagatttgacggagaatcattgaaagaataaattccgtaccgaagtgcaaagatatctacaagcttaactccatcggaaatagacgaaatattagaaattaagtttttcagcttgtaatagtctttaagaacgatagcccgcggcaaaactgtggtgttatacccgttatagcgagttttccaattctcaggccgagtatcaagacaagcaaatttttcaagaacatcagtgatttctgttgggaatcctgctgcaattaattctttaatttgaggtgttgccattggaatatctccagcgcattcatataacattttattatccaagttaggggcccgaaggccccggtaaaattacttcagactttccagatattcctggacatcagcagtggtggtttcaataccaggctgagtaccgctgaaggtttcaactttcatcatgatgtcttgtacatctactttagcgagttcagcgatttcaatcacgtcatcagcagaggtaatacccagagcagaagcattacgggtctcacggatgtattcgagtttcactgccaaatcaagacgttggtcatcaagtttaactacggtttcttcaatttgggcccgcatttctttatattcggcagctttatcgcgtaaagctttagcagtacgacgatacagaagacccagtttagcgtgggtttctacattcataccttctgccatcaagcgacgaatttcgcgctctttggaagcacctgcctggtctttttcgtcagcaagtttcagcagacgcttttcttcatttactgatttaacatgcgtggtacgcagtttagtgatttcatcaataatacgatttgctgcagtggtgtactggtcttcaacagaagtgttctgtgcaacaaatgtaccgaatttagaacggatgaattcaacgagttttttcagaatagacattttatttcctttcaatagttatggtggttttattcgtacggattaatccaatcataaacatatggtttaatgattagaccttgttcatttttgctgcgctcgaatatctcgatgtaatcagtgacgtatgattctaatccgagaataagtacagactctttgccttcttctactgttgctttaattaaacgctcgatggctattttagcttcaagacgaatatcagcaagagtttttggaacttcatttgtatgcattaatgagttcctccattttgtccaaaactgcgatatcaacaagacgattaaccgccgggtcatcggcaaactcattgtaagttgaaatcaccaggttctcaatagttttcagagcagccattcgttcttcaccggatggaaaatttggagtttcaccaaacagcctggcaaaagatttaaaataagtttgcgctactaatctcaacttatcctgatacatattaatttcctcagtaggtgtggagttcattataactccccaaaattattagcagttaattaccgcttcaattcgtttaaccaaagcaggaacagttttagcaaacttgatagccatttgaaccgtagcagcttcttcatggtaaactcgaacgtagtactcttcaacagcaggccaatctttgcgaacgtgtttaatcaaatctttcagttcacgggtttctgctacgttgaacactgcattctcatgttcacctttaatccaaactgcacgataacgatcaggagtaccatattgattataaccacgttcaatttggataaagttgaatttagacattttattctccgttactctgttttgttttgatggagctatagtaaccgagttgactggcgttgtaaacaactttgtgcacaaattttcaaataattttagggaatctggaaggactttctggagggtagaatggatttatacagcttgggatatagaaatgcccagacgacctctagaaggcatctgggctataaattacagtttcttataatggcgaccaacatcaccaacatagtgtgtcagttgcttcaaacgattaccgaaatcttctgttttagaactagtgcttaaaccatacagtactgcatataaatcaggtgtatcacgtacgttaactttagatgcgattgacgggtcaacagatgcaactacctttgcgtggagtttagcagataatgccgcagctttttcgtatgcagtgtgaacatcagcccatgctttattcagtgctttaacatcagcgtcgctaagaacagatgactttttagcagctttaggtttagcagtgcctggctttggtttagtaaaaatttcaccagttacaaccattgatttccatgcgtttgtaacatcgttgccgcggaatccaagttctttcatatcacgcgcgaattggaatcgtgattcatcggaagtatctttgtatgagtattttccagcttccatagctgatatagccgcagctttaacatcagaagaagcctctgccaaaaattctttaaatttcattataaattcctttagtaatagtgtcgatttctatgatatttatactaaaaagccccgtccgaagacggggctctgaaaatcgacagcatcacctactggcagatgacctgctaaattcatttctttggactcggaggcatcagtctcatccaaagaagtatagcgtcaggaggttatgcttgcgacagtgaacaaccgactagcggtaatggacgaaccattctcttctatctgacgactcaacgagggcatacgcaagtttcccttcgaatttggtgccgattgcaggagtcgaacccgcgacatcttcattacaagtgaagcgctctaccagctgagctaaatcggcttggtgcaccgagagggattcgaaccctcaatccttgcggcgtagcattttaagtgctatgtgtataccagttccaccatcgatgcgaaatggtcgaggcagaaggattcgaaccttcgacctgcggattagaagtccgctgctctatccagctgagctatgccccgagattgttcaggcaggactcgaacctgcacgactgattccgtcggcgatttaccaccatcgccagcatatgatgcaatatgcgagctcaaaaggtgtccgtcaccatgtctaccgatttcaacactgaacaagataattatattactgattatttatagcatttctcaaacgataaagttgattacagaattcgcgttcagtcaaaatcgtttcagaaattttgtttttgcccatactgtgagtgagcgtagcattccgggtagcagccaaagcttttctgaatccttcatttttactaagtgcatcgtatgctcctgttagtaaattctgatacgcttctgaggcacggtgaataggaacacctttccaataaagcgtttgtgttggccaccaacgtttcttcttacctttaaacttagcggactttccgactagtgtacatacatgtgcttgcatttcaggcgaagaaaatttgagggattgcaagaatccctccattgatgcacattctacgccatcatagataaatttatgaggagcgaaattactcaaagcacatgatggatatgaactacctgaaccaatatccattacttttccttcacgtatttcaaccaatcaacttttaatgggctttctttctgattatacgtaattccaacatggaatgcaactggagcatcaggaatacgaatttcttcttcaatgttgaagatttctactttctcaaatactcgcatgaaatcatagtcatattcaattggattacccaaccaagcctgaatagcatacataacttcatttgaacaagaatagtggttatctaaataagcatcaaactcttcgtctgtgcaatcatatgcaggaacatcaacgccaaagaatttcttggaaaattcaggagttacatacttctgttcagtgtgaagcttttcaagaattgcttcatggttgtaatcattatttccaaggtattcaccacgccgaccattagaagagaaccattcaagaacgtgaattacttgattaatctcttctttttctaagccataaaccatttgggtagaatatcggtcggcatcattttcccaagtggtaattgccattgctaagcctttaggaataacttgtccaaatttaactttcattatacattcctcatatctattcgttctaaggtatattctttaagaacaatctgttgaccacttttcaacaagaataattgaataggatttaatccaaacccgtgttctaaatcattgtcagttaaatttctgtcgcaataattgaaatacatgtcaattctaacgagaatggttttcataactcctcacacgaatttggtgaccctggcaaagactcgaacatgcaaccaatcccttatgaggggaacgctctaccaattgagctacagggcctttatagaaatcttacgacttttataaaagccctccgaagagggcgccttgtcgggcttatccacctgctaggcagaattactcacacataaaatcagctacttcccagaagtcatttttaactgctactttaaccaccggagaaatttcagatgttttaatagaaacaattacatcacctgcgacagtttctaccagaccaacgattttctcgctgcgagcaacaaatttactcaccggatgaaatttaccggtagcagcgaacatagcttcttggtcaacaatcagtgcgatacgtttcattctttttccttgtttgttttgatgtagtaataataacaggttattcttgtagcattaaatctcgaaaatcgttccgttttcccacattgttgcgaacataggagaaaccttaacgaatgatttgcttcgcattgcaacgtagtcgttatctactttagccaatcctgaagcaatatcagtaatacggccacacttcatagaaccgcgaccacctttattgtatgtgcgttctccgtagaaaacgatatcaccaacttgtacttctcgacctttagaatctttcatcatatttcgcctggcaaatttgtttaaaatctaatacaagttgctctacattagtatcagcggttaacggagtaacttgccgcagtttattaattttacacccagagtgataagcaataatttcttgaatatcacgttcactaaagtactcatatttgagtaatgtgtcgtatcgatatttaatccaaacccacatacctttgcgttcatcaaatgcatatgcaaagtcagcgttaatcattaaatcccgtttagcacaagatgaaagccctaatgctaaattaaccggtccatccaaagacagcttcaccgtaatagcatttacgtcatttgatacaccaataaaaatattcattctatttccttcgcttgtttttggccttcttgtcgtgcacgagaacgtcctgctttatgcagtgattcgtaatatgctcgacgtctatcaatgttttctgtacgatatgctttcccgaaatgggatgttttgaagccgtaatatttcataatataattctcaatggcgagtgattggacggtatgcccggcctcgaaccgagtcacattgactttgcagaatccatgtgtttaatatatcacccatactcgatagcatatctgaacgagactgcaatcccgctactcagcttacaccatcttgtattgtgtcataccgttaatttggtctccatagaatgactcgaacattcgacctttccatcccaaatggaacgctctaccagactgagctatacggagtaattttgatttaaaattcttcttgcttgagtgtgacttacaccaatatgtttagcatatttagataattcgcctcgtttagaaaaatcatataatttagaaatttccattctgtaagctctttcatctgtactaactctagctaagtttaattcggatatctttttcttgaattcagccgaatggtgttttcctgtaaatccgcttggcttaccagccatattatctttccatgtaggtaaatccaaggatttcactgattttgaaatctttttcttatgctcatctgataagggtttattagcacaagattttccaacttttgacatattagttcttcgttgttcggacaagatttcattattacatatgtggtcccatccgccttcaccaccaagctttaagttatatgtatcaggccttttaataaattcttcatttactaggtgtctttccgcatcatacatatctttagcattatcaaaagtttcaagaatttctttttcaaaattttcttttccgtactttttaatagcacgctttaaattcttaccagaacccatatatccatcttccaacttagaagtagaatgaactccaatataaaacttttgatttattttatttgtaattttataaagatagtaatgcatatcagttcctattaaaagaaccgagcgtctctcgacgagtcacaatttggagcatccaaagggaatcgaacccttatcaagtgagtggaagtcacctataatagccgttatacgatggatgcaaatttggcaggccctgaaggaatcgaaccctcatcactgggtttggagcccagcataatagccgttatactaagaacctgttatttggtgggagtaactggactcgaaccagtcaccgctcgattatcggtcgagagctctaccaaatgagctatactcccatggaaagctaatcatctaattgttgatgtaccactgctatgggcagcgtttaactttcataaatttggcggagagtaaaggagttgaaccctcaccgtttccgatggcccggatttcaagtccggtttgctaccactagcgctactctccaatatttggtgaaggaagtgccatatagacacaattcgcttagcgacaacccagcatgactgtgggtcgtgtatttttccaccattccttcattgttggggtgaccgatgggagttgaacccatgactacgagaatcacaatctcgagttctaccaactgaactacggccacatcaatattcactccatccatcatgaggacttcatacgaaattaagagaagaatgatcagttcaacccctgtagacgcgttgaatgaatattaatttggctggactatctggattcgaaccagagataccggagtcaaaggccggtgacttaaccgcttgtctatagtccaattatttggaggcggaggcaggactcgaacctgcgcgtgtcgggatatgagcccaacattctaccaactgaagttactccgcatttatccgggttcttgaagtactaacaagtagcttgatgtagaacacgctaaagatataatcttacgaatatagagcttattccgtgggaacaaacagcttcgtcctcggcattatcttacaggactcaaactcatcttcaagaactgccacgttcttatttggcggacctaacggaattcgaatccgtgactctcgcgtgacaggcgagtattttaaccgctgaaactataggtccataattcgctttcagagatactctggcacgatgccgaagcaaaggggaacaggactctcatcaccttggtaccagatgaatcttgtttagcactctgttctaagatgtatccctgaaagcgaactttcaacgccgtaagaaattataacatgaacaagcattaagcaggatgaaatcatactccttaatacaaacgccatgccagggatttctgtgccgacgattttatcagaacgtcttctgacttcttcatttggcgggccgtgcaggtatcgaacctgcctagtcatttctgacacggattaacagtccgtcgcttaccctctcagccaacgacccgaatttggtgggacaccgaagactcgaacttcggacacccggattaaaagtccggtgctctaaccaactgagctagtatccctaaatttggtggggagtaatggagtcgaaccactcgagccttttgagcaacagatttacagtctgtcccgctacccctacggtctaactccccaatgggtaattttatttatactgctctaaaattaatcagagcagttgatagattaataataacaaagaaaacctaaagcatattacacaatcggtgagctctttgatttaaccaggaataccctatgcggtgaatccatatgagagagcaatacccggtgctcaggaattggacttgtatggaacggaaccacacgataacctttaggcgtaaatcctagcaaaataccaacgcttgctgcagaaagtgacccgccgcaatagtatgataccaaatcaccaggctggatttcattgtcaagagaatcagttttgacatgcttaggcgtaactaaatcattaggaattggaacgccttgtgcatcatagtattcatgggcaagaagcttataattctcttgatagaaagtattaaacgcagctctgatattcatcacaatttcctcacaattaatctttgtatgcttcagttgaacctttagcaacggtctcaaatcgggaattcagtatctcaaaatagtcttgatacgttccctggagggcttcatagcattcttctaccgtagagtagacacctctgatttggtcagagccaggagcaggataataattagaccaagttaaaagtgcgtacattacttacgtttccagctgtagtgagccaaaataagaagcactgcaatagcaagtagtgatgaatgcagtgctgccagtagtgcacctagtcctacacccaaagtaacataatcatacttagttacttcttcacggtttaaatcatagtttttgatgaaccactgcttaatctttttcatgtgctattttatccattatgaaagaaatgatacccattagaaatgcaacacttaacactgatactgtttcaggaagagacataaaggctgcacctataatgccaaaacctaatgctcccatgcagattgttgatgcaacatttctaattaattcacaacgtttcattttattctcctcaagttgatagggttatagtatcactactacaacccgttgtaaacaactttattcagcgccagcggcttttaaaagctttttaagattagcagaacctcgggctgaaaaagttaccttaccatctttttcaccgatgctgccagtcaatttagaaagtttatcactaggaacttttttaaaatcggctaatgtcccgtcaacggtttttgtaacaatcggcagttcatcatcctgtcttttagcttctgtaataaattcttggtacgttttcatgttgcttccgttttgttagtttgtttttgatggagctatagtatcaccactaggaccggttgtaaacaactttgtgaaataaatttctatttcaaatcttctgaccagttcagttttagtggctcttggtactctctatcaagcactacaggtacttgaacttcaccctcgaagtgagctggaccgacattgtagctgagagtaatgtgcggtgagtaatctgggaaatcgtgagttgctcccagagctcttgcatattggtgacggaattttaagtattctgaatctagtttaagaactagtgtacgtccgtcttgcgtgtcccatacttcaagtttacctgatgtagcaacttcaaaacttcctgaagcgcaaacgtatggaacatgaactcttgaatagcatatcgtcgtatgaatcttatgacgaggtacaggattagggaccttcaactcacgctgaaggtcctcaatagcatcaagagttttctcagagaatttagcagctacatatagaccagtgctaaaatcactgaagttcattaggcatcagcttcttcagtagtttcttctgcgaactgtgcttcgatttttgcaaccaggtcatcaagtttaacctgaccgtcttcactgatttcaacgccggacacagcaatcagtttctgtagtacttcttcatactgtgcacgcagagcggacagaccttggatggtttcagacaggtcaaatacacgaactttcaaagtatcgacttgggcttgcagttgttcagtagtcatttttgaattcctaatatagtgttgatttttgaataaagttcttctagagaaccgtcgttagttattacgatatcgccttcgcgaatcggaagtccacgctctgtgacgtgagtatcttttttagaaccttcttgctcaggacgaactacatgaataactgtagcacccatcgccctggctacatcaagttcatggtcttggcgggtatctgggacaatgaaataatcataatcaccaaaagtatcagccataaccaaagtgaatcgtttcacccaatacatgcgatcgagcttatcacagacaatgtcagtcccaagggtctgcatgagacgacgaattgaccatggctcaacaggtttatttattacaacttgacggatgacttccatcgtatcgccgtcaagaattttacgcttgctatcataaaccaccccaggtaaaggcaaatcatgatggacatattcaatagcattcgccataatacgaatcacgtctttagtagacagatttaaatcctgctcacgatcgtaatcaataccttcaatcattgaccgagtaatgcgaggaaactgacgtgatgtatcgcgataccactcagtaagcattgcatcagccaacgcatctttaattggacctgctaactgatgctttgttgcgttatagttatccataatgtagtcagcagttgtatctttgccactacgttttttaccaatcaaaaataaaagcttcaaattattacctcatagaaggatgcattcccataactttctgttgatactgggattcgcgagtatcattgacagaaggtctaccagtaattattataccatctttttcaacttcaatgtatttgtactgcaaagttgctacacataccattgctgggtcggattcttcggttaaagaatactcaatttcagataaatcactcacccaacctccgatgtagcggacagttaatactatatcatgtttatcgttatcaagaacatgcattaaaactgcaccaggaaatccttcaccgccgttattccatccagacttgtctcggtcaatgtagttttgacagcttaacatccatttgtacatttgtacccatgaatcaagattttcatctactaaaaatctaacaggaacagcgtcaaactcaaaagtagacccaggcaatttagcacgatgcatgccttgaggcgaacctacagtatcagtagcaggaatatgaattccaggaactacagctgtttgaagattagctttaaacgcttgggtgaggcccccatcagggacctctaatataaagttagttgtgttagtttgattaaacagtccagtagacattatgatttccatacagaagtagcagagtagcgtttgcctttcgacatgaactgctgcagtggtaacatgactacattcgcccaatcagccggttttatctcaattaaagcaccctttatattaccaggaatatatgctttaatcattttgtcagcgccagcaaatcctttaacttggctccagtttatctttaatctggtcttattagatatcactggcgtattagcatactgtttaagaagttcttctaaaaactgctgacgagcctttggcggaatgtagtgaaggtttaacccatacatcaatgtggttgtaccttgctttccaagaccaagataaactatcaaaggaaatttatcccagaatggaagagtgtctttgtgcttagcgtcatacatgtaagcatatagctttccaggttgaggcttggttacagaatgaccacgtatatttttctttatagtttctgcaaaccatttagcagatttattgtttactgctgcgccttcattacgaattttatctttgatagagcttcgaaatgaatttaccatcacaagagcacgctcttgtttggtcattttgttagcaggttttttctcaatttctgctactttaattgccgttttaattcttgatgcatgacgagccattgctttactgaacgtagcaggatttattcctttgctttcagcgaatgatttagacgtcatgccttttttacgagcagcagagtattcaactcctaatgctacccattgattttcactacgggatttagctttaggcgattctgcagcttcagtgataaattcaaatatagccatcagcctttccatcctaattttttaagtgaatcttcggtaattaacctaaattctatacccattttactggcagtagcttgagctgctttccacttatcaacgtttacagaccaagtgtaaatttcatcaatgtaccgtttcttcgctgatgtcgtcaactttgtgggtttgaccggaggtctagtttctttctttggcttaacttcaaaaaagaactgttgaccattagaaaacttagcccagaaatccatgaaataccggcgtttctttccatctgcattactaaagtatggaatgactacttcttcgctattccattggactacatctggatgattgtcaagccaacgcatcatgtactgttcccatgtagaacgataagtaatctttctaaagtcgcctttatatttgtggagattctgcggcatgaatttgccagaatatgccatagtggcctccttataaatactgttattaatatttataagaggataaactatgctcttctcattttttagtccgatagattattctgcaaagaccgtaaaaggtgctaaggcaaaagctatcccaaccgctgacatatttcgtaattatcgcaaatatttcgacactgtagcagaaaactatcttttacaaacatattacataagtggagctcctagaccagaagaattagcatatattctttatggaaatagtcagttgtactggattcttttaatgtgtaataacgtatatgacccgtttagagattggattaaaacccaggatgcatgctatcaatttgcacaacaaaaatatgcagatgtaggtggagaccaaatactctatcacgtggatgcaaacggcaatcgttattataacctcgagcaatatcctgaaaattcaggcatttggtatgataaaggggactttaatcatcagtaccctcaatatactggggctttagctggtgttgacatttatgaagactctattatagaaaatgaaaaactgcgccaaataaacattatcaatcctagtgatattgaagcatttctttctgatattatacgagaaatggaaaaggctcctgacagtgaatatgaatcaggtcgatataaatcccagaccacaattggagaagttgtatgattgaaatgaatgattcgttgaaatggtttaccggtgttgttgaagacagacaagacccgttgaaacaaggaagagtgcgagtacgtgtttatgggcttcacccatttgaaaaggtgcaaggagctataacaggtcttcctactgaagaccttccctggatgtcagtgattcagcctaccaactcagctgggatttctggagttggctcatctataaccggaatggtagaaggaacatcagtgtttgggttatggcttgatgaattcaaaacagcaggactagtaataggaacatattctgcgcatagaaaaacgaagccaaactacacggaaggcttttctgatcctacaggccaatatcctagacaggtcgggtcagataccaacccactagttcaaggcgatgaaactgggtatagtgctataccaaatatcattcaggacagaaatttagacattggcattaatcctgatgatgctgacttaagtgatattcctgaagacccaaatcctgcaattacaataacagatatgcttaatagggatgaaggtcttagattgaaggtctattgggacacagaaggatatcctactataggtattgggcatcttatcatggcgcaaaaagtacgtgatatgtctgtcattaataaaactttatctaatcaggttggtcgtactgttacgggaaatcccggtatcattacaatggacgaagcagtcgcgttatttaagcaagaccgcgataaaatgctttctgatattaaaacgaattcacgtgtaggacctgtatatgctaaagtcaacaaatcaaggcaaatggctttagaaaatatgagttttcaaatgggtgtaggtggtttagcaaaatttggtaaaatgcttgatgccatgctcattggtgattggaaaaccgcttatacagaagcaagaaactctgtttggtttaatcagacaaaaggtcgtgcttctcgtgtttccatgattattctaacgggtaatatggaatcatatggagttcctgctccaaagccagaaggaaaaaacctgtctgctgcttacgtagaaccaaagtctggaggtaatcctgaagacccatggactccggaagattcaagaattcttttcaaagaacctgagtcttcatataatggtcagtatccatatgttcacacaatggaaacagaatcaggtcatatccaagagtttgatgatacacctggctatgaacgctatcgtattgttcacccaacaggttcatacgaagaagtagctcccgatggacgccgtaccagaaaaactgtagccgatttatatgacatgactcagggtgatggaaatattttaatctctggggataagaaggttaacgttggagggaacgagacctattataacatgtataatcgtcgacagcaaattgatggcgataacacgctttatgtacgtggaaatgaaactaaaactattgaaggcgatggtactatttttgtcaagggtaacattaagatagtcgttgaaggaaatgctgatatccaagtcaacggtgatgccactactaaagtagatggcaaccacgacgtaaccgtcggtggtaacttaacttggcaagtagcaggtactgtgaattggaatgttggcggggcttggactgagacaatggcttctatgagctcaatcgcccaaggtcaatacactgttgatggttcacgaattgatgtaggttaatcatggctgatatacttcctattaataccacgttacgcgaagtaatagaaggtgaatacgttgagcagtactttactgctcaattatctaccaacgaaacattaaaatcaataaatattatcgactatcaaccagtatctgatatctctgtgtctgaaacctattataaaggtaattataactcagtttttacttttggaaacgatgtgcttaaataccgtgaaggcgatgagctgaagtccgcttcagcgtgggaggatttacctaatcccaaaactgctgatttatacctgtggaaagcccccagaacactagagaagacatttacctatacagttgagataatatatacagtgacagaagaatcgtctggaggttcatccggaggttctagtgctccaatcgtaacagaatataaaaagcaaaaggtttactctcaaaccgttaaaggtaactggagcagatggggcgaccaacttcgtgcttacgtatatgcggggaattaaatggctggtctttcatatgataaatgcgtaactgccgggcatagtgcgtatcctccgacagaagtaaatgctacacaaagcaaagtattcactggtggaatagcggtattagttgatggtgactcaattacaccgcacaccaagacggttgaccctcatgatacgcatggaggggttgttcaacctcgcacatccaaggtatttgtaacaggcaaaaaagctgttcaaatggccgatccaatttcttgcggcgacactgtcgcgcaatcaagctcaaaggtattcatacactaatggctattaaagaacctttaaattatcagttaacgcgtactgcaaacgctatcccagacgcatttactggagcaacattcgacgaaattaaaaatcagcttattaactggcttagtggtcaaaaagagttccaagattttgattttgcgggttcgcgcttaaatgtgctattagatttattagcatataacacgctttacatacagcaatttagtaatactgctttatacgaaagctttattggaacagctaacttgagaagttccgttgttcaagcagctcagcaaaacgggtatttgccaagttccaaatcagcggctactgcatctattatgcttgaggtaactcatccaaatccagagccagcaataaaaatacctcgtggaaccaagtttttagcatatgcacgagattcatcagtagacccatacaactttgttgttaccgaaaatgttattgctttaagagatacttcagcaccagaaggagttaataggtatcttcctattgtcaatttggcacaaggacgtattattcgtactcaattgtcatatgacccgaagaaacctattgttattcgtgatcagtcgattgaccgtaagcaggttaagctgtgggttgatggcgctgaatggactaactggacagacaggtcaatggttcatgcttcatccatttcaacaatttattatatgcgtgaaactgtcgacggaaataccgaattcttctttggtgaaggcgtggcagaagcctctgtagcaggaggagttcttgaaagtaatttcattggtggattaaaacctactaagggcgcgcaggtagttattgaatatattcgtactgatggtgaatctgcgaatggcgcaactgatttcagctatgctgatactctgcaatatatcgtagtaaacaaaatcattgaaaactggtcagattctcctgattatgttggagctgatggcggtggtgaacctgaagacatcgagcgtattcgtgagctcgcccagattaagcgcgaatctcagatgcgatgcgtgtctaaaactgactatgaatcattcgttagttcacgctttggttctatcgtacaagcagtacaatgctttactgatcaggacaaacccggatatgcatttatcgcaattaaaccaaaatctgggttgcagttaactgctgttcaacgagaagacattcaggattatctaaaacctttctgtcttgctccaattactccttcggtaatgagcccagattacttattcattcgtcataatattaaagcttcttatgcgctgaataagttacaagaatctgagcagtggttacagtcaaaaattatagactcaattaatagatattacgttgatgaagttgaaatgtttaacaaaaatttcagtaaatctaaattattgacctatattgatgatactgaccattcaatcatcggttcttctgttgatattcagatggttcgtgaaattgtcaactatttcactcttcctagcgcaggtattaaatactataatactattactccgcggacgttacgttctggtgatttggtctttactgtcactccaactgcagattcatatccagttaatatcgttggaactgacccagataaaaatggtaaaggaaatatggtcattggaccatttaaaccaggtgatattaaagagaatactcatattcagccatatactgaagacgattttgatagaactactaatggagaaagaactcgttggtacaaaatcggtgaagtagattattatggtgataatatttactggagccttggagctattggagccgatcctcttcagtttgaagaccagagtattgagctttattctactcctacccaggatatcgtcttcgcccgcgatggaacacttatcgtatttgagaatgaccttcgtcctcaatacacaactattaaattggagcctattactcaatgacaattgcaccgttcgtcaccagcttacgaattcataagctatctgcgaatcaggtcaatattcgttgggatgacgttggtgcaaacttctactattttgtagaactggccgaaactcgaaacagagcgggggaagttatccccgctgataacttgagttggtcttcactgggttataccgcggataatgattggttcgaacaaaatcgtattgaaccgcttacttattataaaatgcgtgttcaaactacgtcagcagggtttgagccgtctgaatgggttgaaacagaagagttccaaacttttgaagaaaacgcatacacatttgagcatatgcaagaattcagtttagtgaaagaattcattaaacagaagttttctttaaacaacatgtcgtatgttaacttcaacacatctgccatgatggcatctttgatgactgagtcttttcagtttagtcctgaatattctcatttatcagctattgaaaacttcgttgtaggtgaatctggatatcatgaaattcagggacctattgaagcagtgtgtgttgataaaaatagaactatgctgggagaaatagacggaattttgtatctgtttgaaagattccaacatatggttaaagtatcaaatgataaaggacagaattggcaatacgttcagttatttaatgaccgtgtcggaaatccggtttctagagtggtaatttatcaatctaaaactacttcttatgttttaggatatgataaaatcttttacggaaggaaatcatctgacgtacgttggtcatcgaatgaagttaagtttagcgataacgaagttacatttgctaaattgggagaccagttaaagcttggctttgaagtagagttattcggaacgtatgcatcattgcctgctgacgttaccaaatatgctgaagcgtttacctgcaatgacgactatttgtatgttgttgcaaaagacactgtccgtaaagttaaattaaaagatgctccaatagatactgaccctttaagcccgacatttggtgaaaaggtatttgaaaaggaagtatctcatataacaggcaatcctaaatctgtatgctttaaaatggattccgttgggggcaaaatctttgcccttattaccggggaagttaaaaccttaggattagacccaacagacccaaggaacgttgtggattctgcaactaaaggcgtctatgtttaccaggaaggcacaaatacttggaagcgtgtatttggtaataccgatgaagaaaaacgtcgtatagagcatttatggacttctatgtcaactgacggaaaggaaatattcttttcatcagccaattttaagacaacagagtacgctcaggatattgagcttgagacgaaatatccagaactaatttctaccgcagttaaaaatgttaacccaattcagtatcactctgataagcattatcacatgatgagtttcagagcagatgaattttcaagatgggaaacatttgttcctggaccgatgaggttttatgctgaaccttggtttgtctggatggctcgtgaaggcaacagatgctggataagtacagctgaccatgcagttgtcatttataatgatattctttatcaaaaaagagtagatacagcagcacagggaactaccgagcgcattctttcggaagtgtgggataaaggcgacgcaacgttttattgccctccggtttcatttaacggatttttgcagtatgcttctggtatcatgtttcacgagccagatggaaagctgataggttattatgcattcgattatcgtgttcgtgaccaggtaacgcttaactggaaaccaactgatgtaatgtttaaggcgtttctgcagaaccaaacccgtgaagaagattggactcctgaacatactccaggcttgcgtgacccggatttacgtccgtatcttactaaaatgatgccggatagttacttgctacaagatagtaattttgaacacttttgtaagtactatctccaattcctttcagatggaaatggaacacattacaacagtctcgttaatcttgttaagaacaaatatcctcgcgaagaaaatgcatgggaatatctgtggtcagaagtttataaacgcaacatttatctgagtaaagacgctcgtgacgctgtcgtccgtttctttgaagcacgcaagaatgatttctatgctactaaaggaattgaagactcatataagttcctgtttaaacttctttataacgaagacgtcgaaatcgatattgagtcaaagaacactaccgaatatgacattattgttgaaagtacaaatatttctgacgatttagttggtcgtacgatttatactgcttccggtcgtagtaatgtgacttatatcgagagagaataccgggatggtcgtctgttatggcgtattactattcataacttatcaggacggttcattgaaggccaggaaattaaatcagagcgtacggactttgagggtattatagttcaaggtgttcgtggaaaggatatgctgagtaataacattgattatataaaccgcagccgttcttactatgttatgaaaattaagtctcagcttcctacttctcggttccgcgacgatgtattaaggtttgttcatccggtaggtttcggtttcattggtataacattgctgacaatgtttatcaatagtggcttaaatatgaagcatgttgagactatcataaataaactcaagaactataaatgggatgcaggactgccatcagtttatcctgatagagttgctattatcgcttcagatgatacaatagaaagagacccaataaccaatgagcctaggtattcttcacgtgctcaagctggtgaacctttcccgttacctgctaactataatcaagaaaataacaatagtgttatcgctggacaaaaccctggacaacgacgtaagccgttaagtcctacgtttgaccaatcagcagtaacgtttgctaattatcgcgatttagttaaccaacgtcttaaagacgatgcaggtaatcctcgcgatcctgaaaatccgacacaggtaaaaattgatgagtaattcaacaagagcaagttcaacgcgtagcacgatttatcgtgctatcattacatctaagtttagaactgaaaagatgtacacattttataaatcaattggtccgggaacggaccaaaacacgttgtatgtttcatttggtaaaagcactccgtggtcagataacgaatctgaacctgggtttgcacctccatacccggccgataatgaagacggtgtggttgatatttggacaaatatgatgggtgcagtcaaaattgaatcatctatgcttgactgtgttgttccaagaagagactggggagatacaagatatcctaatccacgcacatttttaatcggcgatatcgttgttgctaactctgcgccatataacagaactgatgctggatttggatggatggtatatagatgtattgatgttccaaagaatggaatgtgttcaattggtaatcttacaagcaaagaagaatgtattaagcttgggggtaaatggacgccatcaactatttccggttcagcgcctcgtgggcgtggtgatgcaaatggtactgtcgatttgggcgatggatatctttgggaatatctatatgaaattccagccgacgtatcaattaacagatgtacaaatgaatatatcgtagttccttggccagaagagattgaagaatctccagctcgttggggatttcaaaacaacttaacttggcaacaaaacgactttaacctaatctatcgtatgaagtgtaatacgattagatttaaagcataccttgatgcaatttattttccggagtttagtcttccgggaaatactgggtttaggcagttgtcaattataactaatccgcttgaagttaagccaatgccaaattctcctaacgttaaggctgaaaaaggttggtatagcgcttctggtcttgaaagacagtcaggtgaaatgatttacatggaaaatcgacaacctattatacgttcaatggaccaaacagaagagttaaatttaattttcgagttttaattatggggagcctttggctccccatttttatataaataagactatactttgatatgaggttaacctatgtatacagataagggtaaaaaaataattgacgtcggtgagattggtaatgcttctaccggcgacattctgtatgatggcggtgtgaaaattaatgataacttcgacgccatttataacgccttcgctgatcaacgattatttgcagccggtggtggagctttaaaccaaaaaatccacgcaacaagttattatcaaaagataaaatttggtgatgctaactcggccggtacagttccgatgggttcatgcatagatgctgattgctcagaaggggcagttcaaattcgtctttcaaaaggtaaagcgggagaagctgtattcgttgtaaatagtaatggctcagcatcaaaagctagatccataaaaataacaacaaacggcgaaggtgtagcagatgcatttaaagacggatcgcgagaattgattatcaacacaccaagatgtagaattgaattgtggtgtgttgaagtcaaagctaacggtgctgcagtttgggattattcaatttcaagtatgtttggcagcacatattcaccgttagaagctacatataatttaacaagttctcctattaatattcggcttggatataacgatgattactctactgttaaattgttattaagcttcagcgcaaatccaggtggtcaaaccatcaaaaggcaatcatctgaagtcatgcttatgattgacccgactattacttcatcagcgccaaacggaagagtatttgacactgaatatgcagtgttaagaagcggtgaatcatctgaaaatgaaaagatgtattctatttcatactctattaacgcgcagaaagatttaatatgcacagcttcaacatcttatggaaacgcacgtttggcagttaaagttattgctacacagaccgtaggggtatctcaataatgaaacaaaatttgatagtaggccaatctgtagatgatgggtctggtgattacctccgtaaaggtggtcttaaaattaataacaactttgatgatttatattcagagttaggtgatggttcagttccatttgcagcaggtgcatggaaaacttttaaagctagccctactggaactactttaaatgctaagtttggtcaggcctttgctattaatacccaggcagcaagagttaacgttcagcttccaaagggtacagccaacgactataacaaagttattaaacttcgtgatgtttggtcaacctggcgattaagcccaatcacagttattcctgctcaaggcgatacattaaaaggttcagcttctcctaaaattttcaatactaacttccaagatttggaattggtttattgcgcccctggccgctgggaatatattgaaaataaaacggtagataagctaactaacggtaacttaagtactgtagcgaaaaaatcaattattgctgctgcgggtcagactgactttcttaacatttttgatggcgtagaatataacgaagactcgcttaatgtatatcgtcgtggtaatattttatattacggtgaaaccagcgttatggataaagccaatgctgattacggttctcctggaacagtagcaggtcaattggtagaattaaacggtaaagacattcgtttaaaagttccatgtgttgaaggggaagtaataacatttgaaaccttcctagatggaattggtgtttatcggtcttcatacaacaagttggctatccagatacgagattcagcccagactacatcccagacgattcctgggtcaatgatagtagataaccttactactctccgcagaatcactctggatgacatgggtgtacttccgggcgtaggggtaaatcctaactcgcttgaaatttcattgaacggaaaggaattactcgaagctggaactgcaggtcttcctttattttattgtgaaggcgcggaaggtggatatgcagaagactgtataaacaatggtggtcaatgggtaaattctaaccaagactatagactggaatttgactcaactggtactaacgtcgaagctattatttttggtgaggcgtttgaagataaagaccttcttaccgtccgttggttcaataataacatcggtactactatggatattgacgatatcatggcagaaaccgaccaagtgtatatgaatgctgagcaattagtaactctaaaaaatcgcattgaatacacaaattatgatgaacctaatcagaaaaatatgcgtccggttgctgacgatattatgattaaagtcaataatattgcagcattttttgacgtaatttatccgattggcacgatttatgaaaacgctcacaaccacgcaaaccctgctgactatatgggatttggggtgtggaagctttattcacaaggccgtgttactgctggttggaataatgattcatctgatccttatttttcgcgtaacaacaataacttaaacgaaaatggtcagccatcattaacagcaggtggaacggttggagatttgacatttacgttaggaaaagaacacattcctgaactaatgtcaagagataaagttctaatttcagaccctgaacatggaagcgtagttatcggtggatgtcaattagacccagacgcgcagggaccaggttattctaaataccgtgaagacactgttgctgtaaacaacggtgtagttccaaatgacatcactaaaattcagccaacaatcaccgtttatcgttggattagggtaggttaaaatgacgattgaaactaaaactcgtgaaggagctaaagttaattcaagattagctgctttttcagaatatcgcgttgacccgcaaaatattgcggtaggaaatacggctcctatagggagcctaacctttgaacaaatggatttaggggtttggtatccaaatactgaagctgctattaatgatttgatgtcattgcagtcagcagaaattggaactattatttgcaatgacactggaatatctccacagcccgcacagcaaattacgcgtgctaccttttcaggtgtggtttcattagaacctaaagaagacggttctgttggcgacccagtaataattcacattcttggattgccaattagaattgcgaatggcgatgactttgctgcagtagctaccaggtggtatgataaggtaaaagaattagaagctgttggaaaagtggttcaacaagttactcaatcacctgcaactcctcaatatgttgatattattcatttagattatcagaaccataattttgaaacatataaaaagtatggtttaactgttgaatttactattacttcaccagctaaagcaggttatgggcaatgggatgctatcggcaacgaatctaaaaccttcggcgcgaacacatttactttccactattttagaaggatgggataatggcccagaataactataatcactacagtgatttggccaaatatacgatatttgacccaacaaatacacaatggcctgttgctataaaagacgtccaatcagcgttagagctgattggtagctgggcaagaactgataccggattacctgtagcatctcctacagtagccggtgtaattcgcacagcaacacaggctgaagttgatgctggaactattggtaatgctgcggtaactcctgctacattaaaatccacagttacccgtcctgaagcaactacagcagttcttggcttaacacggtatgctactaatactgaagccgcagcattaaccgcaggaaatagaactattaccgcggcggctctcggtcatgtgtttaaaactgtgaaagcccaagaaaacgtagatggaactgttaggttaactactgcggctcaagcacaagcaggaactgacgaaactaccgcagtaactcctaagcgtgttgtagaaatgattggaaagttcagtgtcagtcctcctagttatacctctgcgacagaaagcaacttgggattagttcgtgtcgcaacccaagcccaggtagcagcaggtgctgttcacgatggatacgcagtaactccaaaaaccttcatggcatcaaaagcgtctgacagcgtatttggtatagtaaaatttgctaaagactcagatgtggcttcagctacttctaacaatttggctgttactccaaaaagtcttcaagcgctaaaatccaccaaggataaatatggattaaccagattatcaggttctccaactactgatgcttcattggcagcggctgcaacagatgcagtctttaaaacccgtagaataaacggaaaaactcttgataatgacataacaattactaataatgatattaattgttatacaagacaagaatctgacgggcgttacatgccagctggaaccagagtaggtaatgttacttgggttgaaggacaatcttggattagtcgaggtgcaacgtttacatgtaatgcaccatgggaagcttctagtagattagctctaaacgttaatgtaaaatttgagcgtaacaacgacggatatgacaatcgtattttcagatttgttgtaatagttaacggttcccaatggggaggtgaacttactcttaacatcgaaaatactaaaggcggacgaaatggtcattcatggagatttgaagcttacgcatctagcaactttttcttcaataacattcctccaaatgccactgttcaaataagaccaacagaagacagtcgtattatattttatgactgcatgcttacattctgtacaaatagaccgtaaggaataatatgaccaaactagtagattcgcttccgtttgtagacggaattccagacgattttcaacagagaattaactggataaaaaatacagagcctcttaatggggcttcaacccgctatggaaatgatggagaactgaatagagcttctgtgcagattcagaaaaatgtggttcaggtacataacgatttgaacaacgttggaactgctgtagaaaatattcaagtagatgtagaccaaatcaaaaaatcgttagaaattacaggttcttctgacgccattgagcaggtttatatcaataaaaagaatattgaaaagcatgatggacaaattcttaaattagaagaagacaccgaaaaacttcgaactgaccttgattttctcgaagaggatgtaggtgtttatgattctagtaaagatgactattacagaacagttcgtgataatatagtttgggttaaacgtgaaattggtgcgtatcctgggcaagatattaacggacagccgaagcaagactctccgggttctggtatgaaataccgaatcatcaacaatgcgtcagctatagtaaaacatgacgagcgtattcaggcgctagaggatgcatacaatgattcagacgtaggttctctgactattgaagtaaacgacctgcgtaaagaagttggtcctaaatccggagctacgtcggcttcaatttatgcaaggcttgtgaataacgctgatgctatttccgcagctaacaatgaaatctttgctattaaccaagccattgattttaccaatccagtaaaaattggagctcgtactactagattagaaaacgattatcgtatagttgacgcaacacttaactctgcacaaaccgggttagttcctcgtgtcaataatattgatgctcgtttggggtcttctgataagcctgatactattgaaggaaaaattagttctctttcaactgaccaagggtacatttctgatgttgtaggacgtgatacttcatcagggcttcagggtcaagtagcatggataaatcagcaagttggtattgttcctggcggacagccgattcctccggggtcaattttagcgagaatgaccaatgttgaagggatgcaaaactcccagcagtctgctatccaggacattcaagtagaacttggcaataacagcgaagggttaaaaggttctgtatttacgttacagactcaaatgaatggtgacttttcgtcagaaaatccggttcagcgggatggtgtgtatgccactgtagtagaattgcaagataaattcgtgactgcagttactgacgtagaacaagatggagcatacctccgtaaacggggcgaatggtttaagaagccttcatcaataggtgaattcagtaaagaagatttcactgttgatttaagttctgatgcattggtaaatcctaactcattggtcgctgcttcatttaatgctggcattcgtattgttgatgatattattgttgatgacgatggcgtattttgtgtagaaactgatacagttatcgaagcttctgattcagataaagccgtccaaattgttattctcgtcaataacattgaggtgtttacttatagcctaggtgttaaagcagtaaccggcgagcaactgttgaaaaccaagaaacttattaagttttcgtctggcgatgcaatcaaaattgtgtatagagctgcttcagaagaatcaaaagttcctgttagtattaaatcattggatattactattcatccagcagtataatgaaagggaccttcgggtccctttttcgtataaataggaatataaagaggagttcatatgtcatacaacacgtacaacccaaagacgcttaaagacgctatacttcgacgtctaggagcgccggtaattaatgtcgaagtaactgaagaccaaatttatgattgtattcaacgagcattagagttgtatggtgaataccactttaacggattgaataaaggctatcaagttttttatattggaaaagatgaagctgacaacgcaagatttttaaatggtgtgtttgatttgcgtggtcgtaatgtatttgctgtcactcaaatcgttagaacaaatgtaggttcattaacttcaatggatggtaatgctacctatccatggtttactgactttttaatgggaatggccggaattaatggtggaatggggtcaagttgtaataagagttatggaccaaacgctttcggtgctgacctgggctattttactcaattaatgacttattggtcaatgatgcaggatttgcttgccccacttccagactattggtataactctgataatgaaatgcttaaagtaatgggcaacttcatgaagggagacatcattgtttgtgaatgctggactaaatcatttatgaatacagatgcgatggtaggcaatacagcaggatacggatttgctgggccgcaaactgctgaccattggggattaggagatagatatcagaatcctgaccttcgtaataatggtcaatatgccggagaaggtaacacaaacagagaaggtgcttataataatcgttgggtaaaagattatgctacagcactgactaaaaaattgtggggtgaaattctgtttaaacaccaagggctacaattagccggcggcgttacagttgatggccaaacacttaaagtagaggcccaagaagaaatcgagaggctccgagaggaacttgatttacttgacccgggttgtcctattctgttggggtaaaagatgactacatttaattctagtttattcgctcgccttgaggattaccgaggatacaataaaactaatgagacagaaattctcaatccttatgtgaatttttataatcacagaaatagccaaacgttagcagatgttttatcagctgaggctattcaaatgagaggaattgagttttatttccttcctcgcgaatataacaatccggatttgcttttcggagaagacccatcaagtaaattcaccaaggcttggaaatttgctgcttacttagactcttttgacggttattctggtgataacacgttctttagtaaatttggtatgatggttaatgatgaagtcaatttgactattaatcctaatttgttcaagcatcaaaccaataattcagaaccaaaggcaggtgacctgatttatttcccgatggataattcactgtttgaaattaattgggttcaaccatatgatccattttatcagttaggtcaaaatgttcaacgtaagattactgcgcagaaatacatttattccggcgagcagcttcaaccagaattgcagcgcaatgaaggaattatcattcctgagttctctgaacttgatttagaaccaatcaaaaacattgattctcttgctgatatttctgacgtacaatacgcagaaagcgatgcaattaataaagaagcctctgaatatgttcatccgtattatgttaataacggaagaggacttgagtctcctcctaaagcagattcgtttgatgacggattttttgaataaataaaataaagatgggacctttgggtcccttaggagaaatcatgtttggacattggtataattcgtcattgcgccgatacattgtattgctgggagatttattttctcatatacaaattgctcgctggcgtgaagacactggactaaaatatattaaagtacctatcacgtatgcttcaaaggaaaaattcctttctcaacttgggaaatggactgctgttcagtctaccgagaataaagcaaagatagaaactgttttgccaagaatgaatttacacttggttgatatgcaatacaacgcgatgtataaaacatcacagttgaatagaaccaaatcatataaaaccccttcaaaaattacatctcagtataatcctactccgattaagatgatttttgagttggggatttatacgcggaaccaagatgatatgtatcaaatcatcgagcaaatcgttccttattttcagccgcattttaacacgactataactgaactttacgacaaagacacgagctttaaccgtgatgttagaattgtattacaatcattttctccggatgaagctgttgacggagataatattactcgtcgtagattagaatggtcattgatgtttgaagtcaacggatggctatatcctcctgttgccgaggttgacggcgaaattagaaccatttatttggatttcttcgctaatagtaaagaattaacaccagaaggaaattttgaatctgtggatagcgaagttactccacgtgatgtccagcaagaaaactgggatggttctagcaaacagacgtattctcacgatattcctattccggtaaatccggaggctcctggaccgagaggtgaaaaatgagtgacttacaattagatatggctaaattactagacatcgaaggaattcccggaatagaagggcaagaaattccggtttatgaaaaattagaattagtcgaagttaaatctaatccaaatgatcgtaaacctgacctcgaagacgactattctgtcgttcgtaagaatatgcacttccaacaacaaatgttaatggacgcagctaaaatatttttggaaactgcaaagaacgctgattctcctagacatatggaagtatttgcaacccttatgggtcagatgaccacaactaacaaagaaattcttaagcttcataaagaaatgaaagacattacttctgagcaggttagtaccggaaaaggagctaatcctcaacaaggaatgaatattcaaaacgcaacagtctttgtaggttctactgccgatatgatggatgagtttggagacgcctatgaagcacaagaagctcgagagaaaatagtaaatggaacagactcaaccgtttaacgttctgagtgatgcacatcctttaaatgacggtaaacaagtggttattcgccacccgtctgaaatggaaacgaaaattgaaaacggagttcgtttctttaaatcgcagtgggatgataaatggtatcctgagaaatttgaagactatcttaagttgcatgggatagttaaaattcgtttgcaaggtgaagacccagctcatttccaaacgtttaaggacaaaaacaataagcgcacccgctatatgggattgccaaaccttaaacgagcaaatattaaaatgcagttgacacgtgaaatagttgcagaatggaagaaatgccgagacgatattgtgtacttcgcagagacctactgcgcaattacacatattgactatggtactatcaaagtccagctccgtgattaccagagggacatgctggaaatcatggcagccaaacgtatgacttgttgtaatcttagtcgtcagcttggtaaaaccactgtagtagcaatattccttgcgcactttgtctgttttaacaaagataaagcggtaggtattcttgcgcacaaaggctcaatgtctgcggaagttctcgaccgtactaagcaagcaattgaactgcttcccgactttcttcaacctggcattgttgaatggaacaaaggctcaatcgaattagataatggttcatctattggagcgtatgcttcaagtcctgacgccgttcgtggtaactcatttgcaatgatttacattgacgaatgtgcgtttattccaaacttcatcgatgcatggcttgctattcaaccagttatttcatcaggtcgtcgttctaaaattattatcacgactacaccgagtggattaaaccacttttatgatatttggactgcggcggttgaaggtaaatccggctttactccttatactgcaatttggaactcagtaaaagaacgcctatataacgacgaagatatgtttgatgatgggtggcaatggtcacttcaaactatcagtgcttcttctcttgaacagttcaagcaagagcactgcgctgaattccatggcacatccggtactcttatttccggtatgaaacttgctaatatggattggattgaagttactcctgactcacacgggttttataaattcaaagaagctgaagcagaccacaagtatattgcaacccttgactctgctgaaggacgagggcaggattaccatgcactaaatattattgacgtaaccacatctgagtgggaacaagttggagtattgcattctaatacaatttctcacttaatcctcccagatatagttattaaatatctaatggagtacaacgaagctccgatctatatagaactcaactctactggcgtttctgtagcgaagagtctttatatggatttagaatatgagaatgtcatttgtgattcaatagttgacttaggaatgaagcagacgaaaaggtcaaaggccgtcggatgttctgcactaaaagaccttattgaaaaagacaaactcattattcatcatcgttctactgttcaagaatttcgtactttctctgagaaaggagtgtcatgggcagcagaagatggatatcatgacgatttaattatgtcactcgtaattttcgcatggttaacaacacagcaaaaatttgctgatttcgtggataaagatgaaatgcgtttagcatctgaagtttttaaacgcgaattagaagatatgaacgacgattacgctcctgtagtgttcgttgacgccgtgaatagcgcagaatatgcgcctcaagaacatggtctttcatttgtataaataataaaaagcaaacaacattgaggatatatcatgcctttagtctctcctggaattgagctcaaagaaacgagcgtacagagcacggtagtacttaacgctacaggtcgtgccgcaattgtcgggaagttccaatggggtcctgcatatcaagttacccaaatcactaacgaagttgaactggttgatatgtttggtggtcctaataaccaaactgctgattactttatgtcagcaatgaactttctgcaatatggtaatgatctacgcaccgtccgtgtagttaaccgtgaagctgctaaaaacgcatctccgctggttgataatattgaatgggaaatcacaactgctggtagtaactatgaagttggtgataaaattacggttaaatatgcagaccaaaccgtagatgacactggttcagttactgaagtagatagtgacggaaaaattaagtcggtgttcattccgacatcgaagattattgcatatgcaaaaagcattaatcaatatcctgatttagggtcttcgtggacaactactattacttcacagagttctggtgtttccgctgttattactctgggcaaaattatttctgagtctacagttttactgactgagcatgaaactgcccatgaagaaatgacaaaaaccgaattccagactgctcttgctaagtataaaatgcctggaattgtagctgcgtatcctggcgagctcggaaatcagttagaaattgaaatcgtatcaaaagctgcatttgataaaggtgaacagctgacgatttatccggctggtggaaaacgcgcttcgactgcaaaagccgtatttggatatggtcctcagaccgatacccaatatgctatcattgttcgtagagatggcgcggtagtcgaatccgcagtattatcgacaagccgtcaagacaaagatatctacggaaataacatctttatggacgattatttctccaagggttcttcacgctatatatttgccactgcgcaaggatggcctgaaggctttgctggcgttattcgtctgggcggtggggtttcagctaatgaatcagttacggctggcgatttaattcaaggctgggatttatttggtgaccgtgaagcactgcgagtaaaccttctgattgctggtgcttgcgctggtgaaacagatgaaatcgcgagtacagtgcaaaaacacgtggcgtctattgcagatgagcgtcaagattgtttagcactcatttcaccaccaaggtcaacgattgtaaatattcctctgacccgtgctgttgataatttaattgattggcgtcaaggtgaaggaagctacgactctgcaaacatgaacatcaatactacgtacgcagcaattgatggcaactataaatatcagtatgataaatataacgacgtaaaccgttgggttccgttagctgctgatattgcaggcctgtgtgctcgtacagatgatgttgctcaaccttggatgtcaccggctggttatcgtcgtggtcagattctgaactgcattaaacttgcgattgaacctcgtcaagcacatcgtgaccgtatgtatcaagcaggtattaacccggtaacgggtcaaggtaccggtgatggtttcattctgtttggtgataagactgcaactactgttccaacgccgtttgaccgaattaacgttcgtcgtctgtttaacatgctgaagaacaacatcggtgattcttctaagtggcagctgttcgagttaaacgataactttacccgttcttctttccgtatggaaacaagccaatacttggcgggtattaaagctctgggtggtgtatatgacttccgagttgtatgtgataccacgaataacactccagcagttatcgaccgcaacgagtttgtagcgagcttctacatcaagccggcgcgttcaattaactacatcactctgaacttcgttgctacggcaactggtgcagacttcgatgagttaatcggaccacagtaatatgaaccccaggacattctggggtcatctaacctttagatgataaattatattaccgcacactttaatagcctctacgatgatgtagtcaatcgagaggctatataaatatctataggaaacaacgatggaattaacagacatcactcgtgcgtttgaatctggtgactttgcacgtcctaacctgtttgaggtagaaattccttatctgggtcgtaacttcagtttcaaatgtaaagcagcaccgatgccggcaggtatcgtagaaaaagttccagtcgggtacatgaaccgtaagattaacgtcgccggtgaccgtacttatgacgactggactgttaccatctataacgatgataaacatgaagtacgtaaggcaattattgcttggcaggcacaggcccacgcccaaggcaatgatatctctggtatgactccagctgattacaaaaaggttgctacggtacgccagtttagtcgtgatggcaaaactatcacaaatgaacacaccattactggtctgtggccaactaacgttggtgaagtacagatggactgggattcgaataatgaggtagaaacgttcgaaactacctttgctattgactggtgggaataatgttatggggcttcggccccgtatcgaagttctgtgagttatttgcttaaatatctgacaaaacttcgatataaatatacttatagataatttcggagactccaatggcctttcatattttggacttattcgctccgtgggaaaaacgcgacgaagctgaatataagcaacaaatcaacaatgacctagagtcaatcactgctccaaaatttgatgatggagctcgtgaagttgaatcaaacgaaaacgaaatccagtataattcattcaaccaaatgatgtttggttccaatgaacctggaatgaaaacaactgctgatttaatcaacacttatcgcagtttaatgaataactacgaagttgacaatgctgttgaagaaatagtttctgacgcggttgtatacgaagacggtcacccagtagtttctcttgatttagattctaccgatttcagtcaagcaattaaagaccgcattcttgaagaatttaatacagttttaacatgccttaatttcgagagaaagggcgctgaccatttccgccgttggtatgttgactcaagaatattcttccataaaatcgtcaacaccaagaaaatgaaagacggaattcaggaactgagacgtcttgacccgcgcaacttacaattcattcgcgaaatcgttactgctgatgacgctggtactaaaatcgttaaggggtacaaagagtatttcatttacgatactggcaaagaaagttattacgcagatggtagattatattccgccggaacgaaaattaaaattccacgcgatgctatagtatatgcacattctgggctagttgattgctcaggtcaaaacatcattggttatttacaccgagccgttaaacctgccaaccagttaaagctattagaagatgcgttggtaatttatcgtattactcgtgctcctgaccgtcgtgtgttttacatcgacactggtaatatgccttctcgtaaagcggcagcacacatgcagcatattatgaacacgatgaaaaaccgtgttgtatatgatgcgtcaactggtaagattaaaaaccaacaacataatatgtcaatgacagaagattattggttgcagcgtagagatggtaaagcggttactgaagtagatactcttcctggtatgtccggtatgagtgatatggatgatgttcgctactttagaacagcattatacatggcattgcgagttcctctttcacgcatgccggatgcaaataatcaaggaggtgtgcagtttgatgctggtacagcaatcactcgtgacgaacttgattttgccaaatttattcgtagattacagcataaatttgaagagattatgcttgatccacttcgcactaatctaattcttaaaaaagttttgtctaaagatgagtgggaagacgaaataaataatattaagattgtgttccataaagactcatatttcaccgagttgaaagatgctgaagttatggagcgtagaatcaatatgctcacaatggctgaaccgtttatcggcaagtatatttctcataagacagcaatgaaagatttccttcagatgtcagatgaagaaattgaacaagaagccaagcaaattgaattagagtctaaagaggctcgcttccaagaccaagaaaatgaagaggatttctaatggaaaattatatttccgcaattgaatccagagacctcgtagcagccaaaaaagcttttggtgcaattatggctgaacggacatctggtttaattgaagagcgcaaaaaatttatcgcagcgtctgtcatgattgagggtgaagagcccgttgacgatgaagatgaagacgacgaagatgaagataagtctgagaaagacgacgacgaagaggacgagtaatgcttatactgcctgaaaatcatgaattagttatcgacgctgtcgaagcttttcttcctgaagcacaggcacgttttgataagttgtccgcagcgctttctaaagatgatataaataaaattgtagagaacatggttacttctgagcctgatttagcaattgctttaggttcaattaacgaatctctacaattaaatgaatttatcgttaagcacgttgattctaaaggtactattacccgtaccaaagatcgtaaaacacgtgagcgtaacgcgtttcaaacaaccggactttctaaagctaaacgccgccaaatcgcgcgtaaagcagtaaaatcaaaacgtgctaatccatcggctcaaactcgtggattacgtaaacgtaagaaagcacttaaacgccgtcaggctctggggctaagttaatggaaaacctcaatgaacaacttttaattgagcattggggtcaaccgggcgatgtaattgatggtaaacccatgctggaatctattatcgttgaaggcgaaaatgaatctggcttaaaacctggtctgtatatcgaaggtgtttttatgcaggcagaagtagtaaaccgtaataaacgtctttatccaaaacgcattcttgagactgcggtaagccgttatattaaggaacaagttgctactcgtcaggctctaggagaattaaaccatccacctcgtgcaaatgttgacccgatgcaagccgcaatcattattgaagatatgtggtggaaaggcaacgatgtttatgggcgagcaagaatcatcgaaggagaccacggtccaggtgataaattagccgctaacattcgtgctggttggattcctggtgtatcaagtcgtggacttggttctttgaaagactcaggaaaaggatataacatcgtacaagaaggctttcgcctgactgttggtgtagacgcagtttggggtcctagtgctccggatgcatgggtacaaccgaaacaaatttcggaaaatacctcggcacaagttgccaatagtgctgatgatgcttttatggctctcgcagagaagttaaaagcgttataaataattatgtaacttaacacaggacatcaaaaatgcttaaagaacttttaatgaccgaagctaaaactatcgatgcttccgtcgctcttgacagtattttcgaatcagttcagctttctccggaagctaaagctaacttcagcactgtattcgaagcaacagtcaaaaaacacgccgtagctctggcagaatctcatattgaaaagatcgctgagaaagcagaagaaaaagttgaagaagaaaaagaaaaagctaaagaagaagctcgcgaagagctgaaagaagctgcttctaaatactttgaccatatcgctgccgaatggatggctgaaaatcagctggcggttgaccgcggtattaaggctgaactgtttgaatccatgtttagcggtatgaaagaactgtttgttgagcacaatgttgtaattcctgaagaatcagtagacgtagtcgctgaaatggaagaagaacttgctgagcaaaaagaagaaactgctcgtttatttgaagaagtttctaagcgtgatgcttatatcaattacgcccaacgcgagtatgctattcaagaagcaacccgtgaattgactgatactcaaaaagagaaagtagtttctctgacagagggtatggattattctgactcgttttcaactaagctgaaagctattgttgaaatggtgcagggttctgtagagcagtctgtaacggaatctgccgatataaatactatcgacaaagaagcagacggtttaaacttcacaactgaagcagtcgaagaaactcctgcgactaaaaccccatccgttatggatgcttatgtagcccaagcggctcgtctttcttaatttaaaaggttatacaacacatgaaaaagaataaacttatcgaaaaatggcagccgctgcttgagaacgaagctctgccggaaattgttggcgctagcaaaaaagctctgatcgctaagatttttgaaaaccaggaagctgatattaatcaggctccggaataccgcgatgaaaaaatcgctgaagcatttggttctttcctgtctgaagcagaaattggcggtgaccacggttatgatgcacagaacatcgcagctggtcagacctctggtgctgtaacccagattggaccagcagttatgggtatggttcgtcgtgctatccctaacctgattgctttcgatatctgtggtgtacagccgatgtctaacccaacaggtcaggtattcgctctccgcgctgtttacggcaaagacccgctggctgctggtgctaaagaagctttccatccgatgtacgctccggatgcaatgttctctggtcagggtgcaaccgagaaatttgaagcagttaaagctggtgcttctctggatgttggtgatatcgtagttcatgatttcgcacagactggtcgtgctcacctgcaggttgtaacagcctttacagttgatgctgctgctactgatgctgctaaactggatgctgaagtcactaagcgtctggaagctggcgaagtagttgaaatcgccgaaggtatggctacttccgttgctgaactgcaagaagcatttaacggttctaaagataacccgtggaatgaaatgggcttccgtatcgataaacaaactatcgaagcgaaatctcgtcagctgaaagcacagtattcaatcgaactggctcaggacctccgcgctgttcacggtatggacgctgatgctgaactgagttcaatcctggctactgaaattatgctggaaatcaaccgtgaagttgttgactggattaactactccgctcaggttggtaaatctggtatgacccagactattggttctaaagccggtgtattcgacttccaagacccgattgatatccgcggtgctcgttgggcaggtgaaagctttaaagctctgctgttccagattgacaaagaatccgctgaaatcgctcgtcagaccggtcgcggtgaaggtaacttcattatcgcttcccgtaacgtagttaacgtactggcagctgttgataccaacgtatctccggcagctcagggtctgggtcgtggttataacaccgacaccactaaagcagtatttgctggtgttctgggtggtcgctaccgtgtatacatcgaccagtatgctcgtcaggattacttcaccatcggttataaaggtgctaacgaaatggatgctggtatctactatgctccgtatgttgcactgaccccgctgcgtggttccgatccgaagaacttccaaccggtcatggggttcaaaacccgttacggtatcggtattaacccgttcgccgattctgctgctcaacagccgaaaggtcgtattacctctggtatgccttctatcgtcaactctgttggtaagaatgcttacttccgtcgtgtatgggttaaaggtatctaataccaataagggagccttcgggctccctttagttgttttaacggatataaataaacttataaatccacagaggaaagcgcaatggctaaaatcaacgaacttctgcgcgagtcaactacaacgagtagcaacttaattggtcgccctaatctcgttgcattaacgcgcgcaaccactaaattaatctatactgacctcgttgctacacagcgtactaaacagcccgtagcagcgttatatggcattaaatatcttaacccaaatggtgatttgacatttgcaacaggtgcaacctatgcaggtcaaatcggtgccccggaacgtgagtcaattgaagaactcactatggcgaataaagattcttttaataaagatgacatgtttaagtaccagaacgtagtctttaaagtgcttaaagacgggccgtttactggtacagctgaaaccgacgaatttggaattgtatctgaagcagtagcagctaataatattcgtatgatgtcagatgctgcagtcactgaaaaattcgaaggacctgattcagacccaatcaccgaagccagttttaaaattgataaatggcaaacagctgttaaatcgcgtaagcttaaaacagatttaactgtagaattagctcaagacttagaagctaatggattcgatgctccagagcttattgatgatttacttgctactgaaatggcagaagacattaataaagacatcctgcaatcattgattacggtttcttctcggtttaaagtaactggtgtatccgataaaggtgtattagatttaactaagcaggattctgctccggaacaaggtcgtactctgtatcgtttcatttgtgaaatgaattcagcagttcaacgtaatacttcttattctggcacctacgcagtagcatctactcgttgcgcggcggtactggcagcttctggttggttaatgcagaagaacgatgggactattccagaaaacgcatatggcattctgaataacggccttccactgtattgtgatactaacagtccgattgattacgttattgttggtgttaaggcagaatttggtgggaaggaaactgtaggttcattattttatgcgccgtataccgaaggtcttgatttagacgaccctgagcatgttggtgcatttaaagttattgttgacccagctagcttgcagccttctgtagctttactggttcgttacgcgctgtcggttaacccatatactgtaggattggatgaggacgaagctcgtgtgattaatgctgcggatatggataagatggcaggaagaagtcagatgtctgttatgcttggtgttaagttacctaagctgattgcggactaatttatgggagccttcgggctccctttttgctataaactaaatatgtcaaacttcggagagtattcctcctcgagggatttaaacactttcttatcgtatagattaacacattctatcccgtgcctgcgagctatatcaacagctactctcgtcccaccagatacactcccgcatcttttctcaggcgcccaatataataccttatctacaggctcagtgcattctaggcccaatacctgcatagaattccgtgcgaataaagtctgcactatcttcgagcattcatcccagtacgacgtaacttctctcgccttaatgatgcttttgattttggcttcgtttgataattcagaccatacaacaacacctgtaccaggaacatggccacaaaagccagaataaggaataatcctacaagaatttgacctatcgtatttcgccaaccacgcttcatctgaacccggagctccacctgaatatgaaaaatgcccctcttccgagaggcgttgacctattgtagtcattagactcagaactctgcgtggcgcttctcgtgaaccaataagcgccaatctcattattctaaaacctcatgccatttactacgaatagtgttttgaattaaagtagtgatttctttcttaacagcagaaggattatcagcgaatagcatgtcatgaccttcacgtgctgcttcgttaatgatatctttcatagtcagacccataacacgaccgaaatctttagcagttacagtaccaatatgagacagaacgttacttacacggttccaggttacatattcagaaaagatttccagaacacgcttatcattctcggtgagttcaaccttcgctttaataggcttatcggatttagccttctcactgaacttagagttcttacacttaatagcaacacgagtaccattattgaagaacttaggatgaaccggcttaagaacatagccttcagctacgccagtttcagaagaagcctgcggaccgaacacatgtttatttgcgtgttcaaggtcagtcgtgtcaacaagctcattatagtaattgacaatagatttaaagtcatttacatactgagatagctcggcaaatgaacctcgaccaagaagtggagccaatttaagaccaaggccagtagcaaacgattctactacataatcgtcccaataaactttttcattaccggagtccgacaggatatcaaacacgtagaaatctttctcaccataatctacgcccttctgaatgccaccgccagcaaattcgccaaagatttgaacagatactaaatccatggtgttcagcatgttctgcatcttaacgaaagaatccttatatttcttcatgataatatcatgaccaaagaaactttcactttctaaaataggtccagtacgcttagccggaacgatttcggtaggagtaataatcacactgaagttagtgccatgaatcttctcacgagccacccactcaacagtatgcatatcaaaaccagcaccgcgaatcttctcgatgaacttaccgttgtaatgattctcgagactagaatattttgcaaacattataatttccttagaatgtgattttcataaagtcagtatcaccgttacgctgggaactggtataatttgtaacaaatccttcatcatgcaaataattaagaacacttgtaatgtgtttcttaactagactactcggatacataattagctcacgcttacccgctaaagcggttttctcaatctgagttaatacttcttcttttgctgctgataattcttctgtggctacgttaatagcagtattagccattctatcggcaaggttcataatttttctctcaataaataaaataaaaccaggagtccatctattttggacaagggtaatggtatcagaggatttccccctgagcccattataccacatcgatttttaaagcaattaatatccgcttggaacaaagcgatacattaatttgtcatgtttatttcgcatgatttcaaactggtttttaggtccaacttctaatactaacggaacatttacatccattagcatccaatcaatttttccataccgttctttaatcaaatctgagattttgcgtgcgccatttttataataagtgctatcgaatattcgaaccatcatattatcaacaaatcttgatgcagaacgccaataattaatattgctcgccgcaggagcaaacttgcgctctaggaacatctcaagtttctcttctacctttttatctactttagacattataaagtcctcatgtgtttaacaagtttcttatgacgagattttatatcaacgtttgttaagcgttttcgatatacaactttctctttttgtttaaaccgctcatgtgctttctcaacagagacccacagcttagcggcttcggctggagtgatatctaacgcccttgcaatttcttgaaaatcctttccgctttcatgcatcaagtgagcttgtaatgctttcataataacctcatctatgtgacgaggacataataaaccaatccgtgaatagcaaaaaagggagcccgaaggctcccgaatattacggatagataatacctgcttcaagcgcagtacgatgaacaatgtatccatttctagattcttgtacatcgacttctggataatcatctagcattttagctagagtataccgatgcaggtaatagtcgctgtcagggtcgtcgagtttccaatctttgccctcaacagtcattcgttggatttcatccattacccaccatccacaccagatataggctgttccacggaacggtagaggatgaatatacggaagttctccgtctggctcaggggctacccttttagtaatggttacattaccggttgtagtgactgtaatcggagtgtaatcttctgcggaaacttcaacagaaaccccaatcacttgagaccctatatcagatgtgtcaatcactaacgtgcttgttgagccttctacaggtgaaccgtctttggtccaagaataaaccccagttgcaccttctggagcaccgatagcgttggctttaaaagatgcttcagacccttgttcggtcgtaatagactcaggagtcaaagtaacagaaacaccgctcatggtctttttggtaaaagcaacagcgatgcctttagttgccgttccattattatagtctggagcagaaaccgtcacttcacaattcagtgtgtagctggtttccgttgattcagttacggtaattgttttacccgtttggccagaaataacagaagagccacgtttccaaacataagcaatgcttgctcctgacggggcgccagtaacatcagctgtgactacttgggattgaccaatttctttagaaacagaagttgggctcaaagttaaagtaatcgcaggcatagttttgttattaacggtcagagttgtttctgcctcagcagtttctgcctcaccatctgctggggtaacagtagcaactactttaacagtcttactacctgcaggtcctgcagcaacataattcatagctgcggtaacagaagactgtggtactccatttacagtccatacaaacgtttctgtgccttcagctgtggctccagaagttgttgcagtaaaattggttgttgctccaatgactgccgaagcagccaaaggagcaatagatacgctataagccataggtgttccttattttaaagttacaaatgaagaattacgtgtttcacgaatcataacagacccgtttcttttgatgtaatagattaaactaaacagtgtctggtgtgctgatgggtgttcaaacgacgttggccgagatttccagtccgggttatctttaatccattggtaaatccaccatggaagagtaatatatcctgggttcttacctagcaattgcatgtttggactaaagtttttaggaagctcaatggtttcatcagttttaacaattttaactactttgtccattgctttggagaattcttcagggtccgtagtactaattggaatgtttgtaagttttccttcatcatcgatatggataatgctatctccaataggagcttcagcataaaatcctttatcattgatagaaggagtttttacttcaaatccagggtcatttactttaggtgtttctttataaaaatctgggtcaatatcatgaattttaacacttgcacttactggagcatcaaacagtagttttgcttcatcagacgcttcatcattgaaaagagcttttccttcaatttcatcatctgcttggattaaatcggcaattgatagaccatcgttgtcttctggcatgggctcatcggccaatttagccagttctttttccaaatcagcaaccatattgtcaaatgagcgggtcttcttcagtttaataccgaaggttttggcatattcgtcgagcttgtctttagcttcttttttatcgagtgcctgaatttctttaatatagtctttatctagcattgggtgtgcctcatgtaatgtataaatatgattgtatttataaactgaggatagtacagtgcacgacatccaagtcaaatttaaagattttagtcatgttcatattgagtgtgatgactcaattttctatgaactcagagactattttagcttcgaagccgatggatacagattcaacccgaaatatcgttatggacattgggatggacgaattcgtctgctagattataatcgtctcttaccgtttggtcttgttggccaaattagaaaattcgctgaccaattcggatataaagtttatttcgatccaactatattcgagcaagaaactctttcacgggaggattttgacacgtggttagcatctaaagaaatctattcaggattaactaagattgaaccccattggtatcagaaagatgctgtatatgaaggactagttaataggcgtagaattcttaatcttccaacgtctgccggtaagtctcttattcaggcattacttgctcgttattatgtagaaaattacgaaggcaaaattcttatcatcgttcctaccacagcgttagttgaccagatgattgatgatttttgtgattatcgtttatttcctcgcaatgctatgctgggtattcgaggtggtactgctcgtgattcgaatgcattagtttatgtatctacatggcagaccgctgttaagcagcctaaagaatggttttctcaattcggaatgatgatgaatgatgaatgccatcttgcaacgggtaagtcaatttcaacaatcattgcaggtcttacaaattgcatgtttaagtacggactgtctggttctcttaaagacggcaaagctaatatcatgcaatatgttggtatgtttggtgaaatcttccgtccagtatcaacttccaaattaatggaagatggacaagtaactgagcttaaaattaatacaatcttcttaagatacccggatgcagctgcaaacgctttaaaaggaaaaacgtatcaagaagaaattaaattcatcaccaatgttaagaaaagaaatcgttgggttgctaatctagctgctaagctagcatcgcgtgatgaaaacgcttttgtgatgtttaaacatgtagctcatggtaaagagctattcgagatgattaaagctactggtcatgagcaagtttattacgtatcaggtgaagttaatactgaaacacgtaatgctttaaaggctatggcagaaaacggaaagggaattattatcgtcgcaagttacggtgtattctctacaggtatttctgtaaaaaacctgcatcatgtaattttagctcatcccgttaaatcgaagattatcgttctccaaacaattggtcgtgttcttcgtaaacacaaagataaatctttagctactgtctgggatatcatcgacgacctcggtgtaaagccgaaatccgccaatgctaaaaagaaatacacgcatttgaattattgcttaaaacatgcattagagcgtattcaacgatatgctgatgaaaaatttaactacgtaatgaaaacggtaaatctatgattaaatttgaagatatttatgaagccacaattcgtgaggctactatcgataacttcatgagtaaaattaattcttgccagaccttagatggtctggaagaactcgagaagtattacgataagcgctctaaagaaactactcttgctgattctgatgacatcattgtgcgtgatgctttggcggggcgtagacaggctcttgaagccgattctgaagatgaagatgacgaagacttctaatacaaaaaagccccaaccgaaaggaaggggcaaagccaattggctacatcaacactagactaaattaaaagctgcgtttcttgtaattgctcttctgtgtcttcagtgacaggcaattcaatcgcataattatagcaagctccgggatgaaccgggcctttgtctgtttggacaaccaatgcttcatcgattggtcctttacagacgacacataccgtattcgacatgattgtctccttagtttacaggtttatttattacgcgccagcttcaaactgacgaaggtcaataatgtgcttaatgctaaaacctcgtgacttgatagcatccattgcatcactacagaactccaaaagaattccccaatattgcaatttagtatctacacccaagatttctttatcagcgcttaaaacagttttcatttctgatttttcatatacatccatgcatacttcaccaccaacctcgccacggccagtgtaataatccaatcgtgctttaagattttgctttttgagggcatctaatcttaacatctcttttcgacaagtcgagtgcttacgcacccatttaccatacagaacggggttattagccgcttcatactgtagtttagtctggtcgataatcaaatcattatccaattcatcctgtaattcttctaatctcattctatctccactctactgtttcttgggaaggactagtcccattatactctactgctagagttagcattactacgcatctgtatgcgtatacgttctagcgtatcagggtcgtctactatagaaaactgcacggtgacaattatagcgttatcgtcatataacggaagcacatcaaccgatagacgattaatcctaggctcataattacgcacggcagagactatattacgctttatcgtatcaccagttaatggagtcatgttttcaaataattcgtttgtgatatcacaaccaaacgatgggtcaaatggccgagacccctttcttgtggttattattccaagaaggctatttttaactgatcgagctcctactgtttttgacacatcagtatcccaagcaagtcgcatctctgggtcaaggtcggaatatagtttatcgatattgctcatgacataatcttaaagaattctttaagccccttaattacatgaatgtgagaaattccgcattcacaagtaatgggaactgccaattgaacctgcggcttcaatagcatatttttgatgttaactacatcttcggttgtaatagcagaatataaatcatcgatttctgcatcgtttaaatcattaaagtaaatctgctcatttccaaccacgatataatctatgcattttgatatcatcattggaatgtcggaatcgtcaaaaagattcggatacttgaactttattttaaatccctttaagtcataccagaggtcttctggaggatcgatttgcgcatgtgtataatttaatggcacaggaattttacgcccacaggtgcaattccaggtcacctcgtgattaacctcgcctatactatgcgcccagagtataactataagtaattccgattcttgtttgtttaacccagtagcattagtacattctctgagcaatgctttaacacattcatcgattgtaccgtttttcttcgctgcaattaaattagcgtattcttctagtgtaaaagctcggcactggatattcttgccatttattcttgtttcaaatttatatgtgatgttcatatccactcctcttattcaattatttataaatagtataaagaggattaccttatggccaacatagttagatgcgaattaccagatggtgtccaacgttttaagccatttaccgtagaagattatagagaccttttattggttagaaacgacatgaacaccaagtctgaagaagaccaaaaacagcttatagcagaattaatggatgattattttcatgaccatcctgtcgagtatcgtccttatatatttcttaaagtatttttgtcaagtattggtaaaactaaaataccagtcagaatgaagtgcccaaaatgcggaaaatataagcagtatctttttaatcttaatcagcctccgttgacaaatccgaaagtagaggttgcaggattaacgcttaagttcaaaaaacctatagaaataattgatgatactggtaaaatgattttagacaacattatatctgtgaaggattcatctggggaataccagtggaatgaattaagcgatagtaataaattgacagttatcgatgctatagatgttgaaaccttggaaaagattttatcgcagatgaagccgtttaactttgagctaaagacgtcatgctgtgataccacgacagtattaaaatatgataacattgttgatatctttaagctattgctacatcctgacgagattttcacattttaccaaattaaccatagattggtttctcagggtaaatacgatttgaattctataatgaaaatgctgcctatcgaacgtggcataaccttatcgcttattgaaaaggaccttaaatcatgacagcacaaagattaggatatcctaatataagcataaaattatattctggatatgatgcgtggctagctaatagattcgttgaattagcagctacatttattacattaacaatgagagattcattacgcgggactaatgaaggattgcttcaattttatgacgcaaaaaacatgcacacgcgtatgaacggtgatgaactagttcaaatatctgttgcaaacagtaacacatcgagaacacaaacccgaatttatgggattaaacactttacagttggtgttgatgataaaggtgatagcattattactcttcagcttggaacgctgcatgacataatgaatctcaagttcagtagagcgttttttagttctgcatatgaaactataaaagaaatgataggtgcaatgtatgttgaccaaccattgattgctcctcctatcaacggaattaacgcttacgtcccacgggttccctggactagtaccctcaaagattacttacgatatgttagaaatgtaggcatttctacagacaacgatcaatttatttttgcgtgggaagacatcaccggaattaacatgatggattatgaatcaatgatatcccaggatccaaatgtattcatgttcggggctcctcaaacaataggtcagtttgctgcaggattaaaatatccattagcatgggattttgaatggcttgttaaatcaaatagatataatagaaatcccatgaaaaatgcaacattttatgcacactcatttgttgacaaagatgttacccgaattattaatggagaaggccaaaacagcgtattcattaatagatcaggcggatattctgacatgatttttaggaatggctatgaagaagcactacgcatttctacgatggctcaatatgacgggtatgctcaaactaagtgttacggtaattttgaactaactccaggaatgaaaatcaactttgttgatttaaaggaccagttcagaactgacttttatatagatgaagttatccatgaaatatcaaataacacatctataactaacttatatatgttcacaaacggctctgcccttgaacctgtagatttgattaaggtgaaaaatgaacttaaacgtgattcttcctattaagaaaatagtaataaatgaaaagacgatatcaattccaaagctggggttaaagcaccataatctgatgaaagatgttaagggtccagatgaaaacatgaatcttcttttggattcaatttgtccaggattaacagcagccgaatctgatattgttgtattacatttattagcatttaacaacagaataaaagaaactgttgttaaagatgattttacctacgatttgaataaagtttacatttgccaacgattaactcaacggttagatggtaaagaattcaaattcagagctcctcctcgttattccaaactaggttcagtagattcaattttgagcgaatttcttgaatcagtagatggaaaaccaatggatataaactttatgaagcttccagcttttgtaacaaagtgggctgatgacttagtaaacactatagccattgatggacctgaaggaccaatcaaaggcatgcttaacgtaatggaaatatttgaatgactaagaaatcagaaatgaattcaatgcgtagaagagttattgctgactcggctccacagaaaaaggctgagtctcaagctgatgctcaaattaatacgctagaagatattggtcgtcgtttagacgaccaacaagcatctactgatttaatttcggatgtaatagaaactaaatcaaacgaaattatcaaatcagtagaagatgtttcagctggtgtcgaattgaccgcagaagcttcagaacgcacaacagatgctgtctcgaaattaaatgatactgcatcgttaattaatgataagctcacgaaacttgccgacctgttatctaaaaagcatgatgttcagcaagatgtccaaaagactggcactggaacatcgttagaaacaataacggaacaagtacctgatgctccggttcagcagccgctagaggaattactcgaaaggcttattcctccacaggatgatagacgtcctgacgcggatttctttcctaacacagaagagcaagaggaaagaaaagaacctaacaaagaaactgaggacaagaataaaaagtttcttgacctaaaatttggagaattaattaaaagcgttaaatctggttttggaaaaactatttcattaacagataaaattagcagcatgctgtttagctatactgttagcgctttggcccaaatggcgaaaaccgccgcgatggttttgggtgtgataatgcttatagatttaattaaagttcattttaattattggactaaattgttcgaaaagaactttgttgaatttaacaagcaagctaaagaatggggtccgctattaacagcaataagcgagatgtcgaatgaaatagtaaaatcattcgtcaagggagattggggcggattagctaaagccattggttctggcttggttgatgtaattgacaagctcggagaaactattatgctcggaatgagtaagcttcttgctggaatgttacgcgcattaggatttaatgattcggcagataacattgaaggcgctgctttagacagatttcaaactgttactggggcagaactcgatgaagaagatgctaaaatgagagcaaaatatgttgaccgtcaggaaagagagtacgatgaaaaacctgaatggaaaagaaagctttctgctaagttccaaaaattcactggtcagattgatgacgatgaatataacaaactgctgagcggagagaaaaagcagtcagcgtatgcagacttaccagaagacgaacgcctcaaaatcatcacagctcgtaataatgctgaagcagaactcaagcgaacaaaagcgtacgttgaaaaaactgacgcatctgattccactcgattagactctgctaaggatgcagtacaaagcacaaccaccagatataaagaattggagaaattatctccagaagttgcaaaagatttaaaggttgaattagaccaattgcaaaagcttcttgattctaaaatatcagaacctgctccaactgccgaagctatacctgcagcagaacaacctgaggttaaacagtctgcttctattaaagccgccgcggatagtcgtgaagctgctcgtacacgtgaatctaatacacagtcacaacctatccaggttaatactgccgtaaataagaatagcacatacgtttatagaacgcctccacagacttcaacagctgctcctggaatgcaaggcgctatgaaaacctcttaaggaaaaataatgatttttgaagaactggccgatggccttgaaaacatcaaaaaatcaggaactcgaatttcccaaggtaaatctaaactgacgaatgcgccaaccactaaggtggcgcagttcccagctgaacgttcagctgggaatgattccgcccaagatatgagagtacatgacttatatcgcaatgggttattattcacagcatatgattttaaaggaagaaccactcctgatttgcgttcatttagacgagatgtaatgttatcgtctgtattcgattcaccaatgtcagcattggctaattcatcaagctctaccactagtactgcaccagtagctaatattctattaccgcggtctaagtcagacgttgattcagttagccataaatttaatgatgttggggattctcttgttacgcgtggcggcggtactgctaccggtgtattaagcaacgtggcttctactgcggtgtttgggtcgatagaatctttaacgcagggattaatggccgataacggtgagcaaatttataacactgcccgtagtatgtatgccgggcctgataatagaacgaaagtgtttacttgggatttaactcctaggtctgcagatgaccttatacaaattattcgcatctatgaaatttttaactactattcttacggtgtgactggaaattcatcatacgcaaaagaagttaaagctgctattgatgaatggtataaaggaacacttaaatcagcagcaccggatggagctaaagtagaaaacactgtgtttgagcaaataacatcgtttttaagcaatgttattgtagtttctaacccaacgatttggactgttcgtaattttggatattctacatcaatggatggtagagaggatatatttggtccatgccaaattcagagtatccgttttgataaaacgccgaacggacatttcaatggtttagcaattgctcctaaccttccaagcacatttacgcttgaaattactatgcgtgaaatacttactcttaatagaggaaacgtttatatcggaggtattgaataatgtttactctcgaagaatttaagagtcaagcggctgatatcgatttccagagaactaacatgttctctgttgtattcgctactgtaccctctagtaaaacccaggctcttctaaacgactttggtggagagctgtataataatatgggtttagatggaaattggcttggattgacaccaggtgaattcaatcagggtataacaactatagtgacacaaggaactcggcaagttgttcgtaaatcaggtgtgaatacatttatgattggcgcaatgactcaacgtgtggtgcagtcattattaggagaatttacggtaggtacttatctgctcgatttctttaatatggcatttccaacagcaggattgatggtttattctgctaaaataccagagaatagactgtcatatgaaatggataagttccataacgctcctaacataaaaatcactggaagagatatggagccgttggttctttcatttaggatggacccagaagcaagcaactaccgggcaatgcaagattgggtaaatgctgttgaagacccagtgactggtctgcgaggattgccacaagacgtagaatgcgatatccaagttaaccttcatgctagaaatggattacctcatactgtatgcttgttctcaggggctatgcctgtagcatgtggagctcccgaatttacatatgatggagaaaatactatagcagtgtttgatgtcacgtttgcttaccgtagcatgcaaacaggttcagttggaaaacaagccgctatggattggttggaagataaggctattcagaaaattgagacgattaatccaaatcagggcttgagcgcgtctgcttcaagattgtctcgtttaggcggggctggtggtggaatttctaatatcactactacgacaagtagaataatttaggggccgtaaggcccctttgttttatgcaatgcagccaataaaccctggctcagtgcgaagaagtttcatttcgtttgtggtccaaactactttaacaggaatgataccttctgcctttccattaagaacggcttctacaaacgatggctctgttggcttacggaagatatcttggataagaactgttggagtaccttcgttaaacccttcaagcatgataagcacttcttcgttaaacttctctgcgtctttaacatcagcagaccattcaataccgttaaagcggaatacatgtttcatatcaatttcctcattggtttgtgtaagtctatagtatcacgtccttgtgataagtaaacaactttatgcaagtttttctgggataccatccaggttgatagcaccagccagtagctccatggtacgtgtgtagctaaccttatctgtagaacggtctggcgaaaagtaaatctcgtttaaaaagcctttgaacttgctttcttcaagaggttccactttgccttgttccatcaagatgtcaccatcatagagatgaaccgattcatcgatttgctctggcggaactaccgtcatttctaccatgaatgtcttgttattcgctacaccaactccatttctaaaaggagttccccatactttgttgactttcattgccaacccgcgaggaagaataacttcagcctcatcactaaaacttgataagacacccgggataactaccttaactttatcagccccatgaataatgaacccaaacttaaactcatcaccataggcaacttcctcgcctctatcaactctttccaagttgtctgttccaataacagaagatactgcatcgatagttgtttctttgttttctaaatcagaactaggtgcgtctggcattaatgaatcaccagcatttgaataagcaccaaagataattggacttaacgaagtagaaacatagttctggaaataaaacattttagactcaatgttatctttaaagtcttcatattttcctcgctgaccacgatacaaaagagtgcctggttcaagacgcaaacctttttcaaaggcagaatcgagaggacgaattttcttgtcaataatcggatcgcctaagctttccataccaataagatagttattaacaaatgaataaccagaaccacagtaatgatgtattgcatctctttcttcttcgcttaaacgagaatgcatttcacggttatattcaattgctttggatatagaatcgccaacaattgacacataagcggatatcatataattgacaagattttggtattgacgtaaagctccgaaatcgtcagctggaggcatatcaaatccgcgagtagctacttcaacgattttacgcattgtttccatagatgcaggatttttagcttgagcaataacgtcagcaacttctgaaattcgttgctcagcgattttcattttgtctgaacccgaaggaatgaaaaccttccagtcgtcatgcattctcgacatttggcctacaaataatctctcaactgcgtcgccaaaattacttccatatccgccacgaacacgatagtgcttgatatcatcaacataaaaaggaattgatttttctaacccggatttaatatccttttggaggtctaccgtatcgccttctgcgtttagtactggagtgttagtagttaattcataccaacgttcgcgtttattttctggccaatcttcatcaacatacgaaacgaatttgccgtattgtgctcggattaaatcttttcgagacactttcattttactcattactgcgagttcagatttcttgtcttctttttcgccaatggaattagccaatgcttcggctttggtaacgttttcgccggtttctttagacacataaacttcgcctactttggaatctactttggtgtaaagttcttctgaaatttcaggaattccttcaatctcttcaagtttcttacctttacgaaccataatagaataagcatacttacctttgtagtaagccatatctttcattagattgaaacgaccgccggtgcgagtagtaatcaaccgagcaagaatgcgttgaatggctttatcctgtccttgcattttcttcggattaaagcggaacattaccgcatcagctttaatttgcttaactactttgttgacggtctcaaaaatggtattgatagcaccaatcgggtcttggcctaaaccacctttaagcgcaccgatgttacctttttcggatacagagaaaacatagacctggatgaatttatcacccatcttgatgttcttaactgcatcaccttgacctgacccttgcactaaccgaatcattaaattgttattacccggcaccttaatcaaaaagacctgtggtaccttaagttttggcttaacgttctcgacaggatagattttactattctcttcatcgaaaacttcatttaaaagttccatgacatatcctcgttagtttattctatttatacgaaaaaaggcccgaaggccttaattaattattgttactgtacgccaaacttgtagtccatttacagactcatactcttcaatgttttctttgaagtttcttaatgtgttaatgttattaaactcaagaacttctgtgtgaacagaaataccaccacgtccgtcaagagatttagcaatcacttcgtataaaactttcattttattcctgttgcctcagtaaagttaacaccaaacgcggcttcgaatgtattagccacttctttatcatatctacgctgtttaatgataggtaagaataaccctactgtaccatcatcacggccttcagcagttacccaaccattacattcaagttcccagatagttcctggaagagaatctctaattttccatagatgagtacgatcaagttcatgtaattcttcgggcttatctttaagacctgacccagcgttaacacgaatacgaccacattctgatacgaacattaagccgcccattttaccaggttgttttctatgctcgtacgaaccgacacatttcaaatctacggtgataacctctttaaatttgacgaggttcttagaacgcttatcttcccaataagcaccgatattcttaaggataataccttcgagaccttggtctacgtatgtcttatagatagcacgagcttcatggatgttgtgtacgacatggttttcaattagaataatcttgtcatagcctttgctcatcatttccagtgcacggaagcgtacatcataagcaaatccaggaactttaccttcagaatatactacatcaagcggaacgtaatcccagacttggaatcgcataccatcagcttcttcagcagagatagttcctttaatggccttattagccaatccgtttgattctgtacgagccgtctgttggaattccttagctttacttagctcaggaagctcaggctctttaaacatatcaaacaggtcgttttcttcttctttcacttcgacatgatataccaactcgccgtcaatcatcacaccattaggatggcgttctcgggcttctttggtcatctcgataagttgacgcttaagtttatctagacccaggtattcattaccggaacgagtaagaagagttacatcatctaattcatctccgcggatttcagcgaagcatcgagctccatcggctttaagctgagcaaatgcagggaacttaatatacgatagcgctttctcagaataagctgatgctaacatctgtggcatctcaggaattaatttcttccataccttattagcaatagaacctgaagcgccgcaacgcatatccttaagaaggacacggactagtacactagcatcaccctcgttcatcttagagagcaaatctactagcccctggattgccatattaccagtaagtactcgtgctgccagaatgtcttggaggtaatctagaccatcagaaaacgtctttgaaggaacatttggatatttaacgggagtatattctggaactttcttaataaagaacttaaatcgcccggaatacgccagcagataagctcgttttaaatcaacgttatctttattgtcaatgagaatttgggttttggctttagaacccttagcatcttcaattgctttgatgatatcaaaaatcattattcacctaattcttttgaaagttcgcttacactacgatgataagttaatccatcaatataaacaaacccgttattgatgcattcattccaaatcgggcacgactttgcttcacgccaaattggattccaacgataaaactgattaacatggccataatcacatgataaccagcgtttaccaaccttagtatgaactacaaacatgtttcctcctagggtatggcaattataccatacccagagtgttagcaattaatttggtggttatcacatgtaatacgaccgttattccaccagtcgtttccaggaggaacatgtggaccaggactaaacggaatgataggttgtttccaccaatctcctggaacttgccgtggaggccaattaaaaggatgttgctctttacgaatttggtctttgatagcttcttcccacaatccggaaagagacttctggggtttcttaacggatttcagagattccaggcaagttacaatttgatgccaatcttcaaccataattccaggagcagtcactgaaccttctcgctcaccacgaggcatatagaacacacgggtttcagtatcttcaaagactttgctggcggcagcaatatgtttaggcaaatcatctacataacagacgatgcgatcgccgtattttactttagccttttccagtaaagcatctttagattcatcataatcgcagaccatgatttccgtaaatgcatcagggaacaaagcattcagattgaaacgacgattaaggttagcatctactgagttgccaagagccgtgatagcgacaaaatcgtatttttctttgagcttattaactgtagctaaagcatcagcatacggagcaagataacgaataaaatcgctgttgttatacttcagaagcagcttaacagctagttcttcttcacaatcaaacagctcagcgggtttaatgaatttttcagtagtcatcatatcaaggatatgctctaccggaaggttatatttctgggcaaagtaaggcagaccactttgccacttaacgatgattccatcaacatcggttgcgattactggctttgacattcggggaaattcctcaatgcttgtttaaatttggcgacgctatttgcggcaccggtgaaattgaaccagattaaccctggagtgtccgagggttctatatcaattaattctatattataatactcagcagtctttagcatttccctggtgatacgtcgggcaaccatatgaccgaaatgaggattaatagacatcgtcgttagcagcccttaattgagtaatcggataaagctcagattccgcatgaattgaacgattgccatcaacccagttgacttcataccaaggctcaaccgtgtaggctttaatggctggagccgtgtcacatacaactccaggaattccatttgctaatcttactgtactgaagatatgatatttcatgcatcaagtctcactgcccattcgggcaattcaaagaaatccggagcatcaatttcatactcaacggtgtgttgtttaacatcagctgacatgatatcaaccattgggtggtttttcaaactgcaagaaaaaataccagctttagatttaggcacggatacaatcattttaatttcctcaaaacttagttatgaatttttctttcggcatttcggcatttgagccatcactgtcagaatacccaattggcatagttgcattaatgaattcaattttagcatttataacattaatgctcagagaatctacgccatcaaccatacgaaattcaggagggcaatacttatcaatgtatgctttcacaccgtttttattggcaggtgtaccatcacgagtatcgctgataatggtttcaacctttttctttcgtgaatcatagaaagctgatacaatcatttcaatttcctcttaaaacgggcgaatattaacgtgaaccacagggacagcaaaaggttgcatgattacaacttttgtgtctttagttgcattcaggcgttgtacttttgcaagattaacagcttcttcctttgttaatccgccattgtaggtatcatttcctttatttgatgtccaaacgccccaatcattgcttccatcatcgtcggtcttcggttcaagttcgttgtagatggtttcttcaaaataatgttgaaattcttgattagtaagaatacaccacatgtgagaaaagcggggttcatctactataactcgttcgcgctctccaccaggcttaatgatttcaaattcaattaatccaatgttttccgcatatctaaaggttctggtaattttaatcggattattaccgatttgctcaaaaacacccttgataagagcgcctggagacaagattggagtctttttaagcttatagaatttacctttttccattatcatttcctcaatagtggggccgaagccccgagttagttaaaacttgatttcgtttgaaacgatatcccagattgcttcacgttgttcttcggttgttttacgaccgaggatgtggcgcagataaattttaacaagcagctgacgatttgtgttccaagacggatgtgaagataaatcacgtttacgaacttcatcatggaaaccaactttgatttcagaaccgttgaactgaatatccagagtaggaccattttcaaagctgaagaatacgtagttatcttcccagtacatatcgatttgagctactgtgccattgttgtgttcccacagcaaagtagtagaaacgtcccaagcattgttctgtacgtatttgcggttgaagttagtgaagttcatttttattctccgtagtttgtttatctgtttgggtggtacaggtctatagtaacccagaccacccaagaagtaaacaacttttattcaaaaactacatttatttcttgtttttctgctcgagcagtagaatgcagtttaaaaatctggaacttatattctgggtcatgcttgataactttcgttacatatttcttggctttttcaagagtgaacaagtttgaattgtaatcaccgcgaacaataccaaattcgctctctttctttccgccgacgatgatgtactgtgcgctgccgtcatcgttaacttctaccattccgcttcggagctcgtacttagtaaacatgatgcaattactaaatcctagcatatctgcgtttagaatttcaccggtgctttctaatttgattgatttaacattaccatgttccgttaacgtatgaactgtccacggcatgcattcaacccgttcagcaataagcttgttaacgttactactggttgaaagatactcattctttgcagcttcggtcaaacggtagcttttattcatttcaaaaacttcagacatttttcacctctacagttttaacagtttttacttctgcaaatccgatgcttttaaacagttcatacttggtagtttctggaacgatatcggttagctcaaggatgatttcttttgcttcctttaaagtgaagacgctacgcccgtctttaaccactggagtaggtttaacgaacgttgatgggatttcaaaaactgcatagcggtcatcagagctttgattttcaaacgctcctatttgcacaacacgtccttcttctaactcatgagaagaaaataagcatgacagagaccggtcatattcatctcctatggtttttgccgaaatgattttaccagtttcggttttaatcttaacaaccctgcccagcgaatcaagttctaacggcgtccagccttgaactccgacaacggtggcaatgagatagttaattgtgttcttagcgtctttccatctacggtaagtttctggggaaatgcaatatactcggtttttgctgtaattcattttgatatcctcaaagatggggccgaagccccagtcaagattactgtttagtccaattatccatgtttaatttaccgacctttttcatttgttcaatcaaagcatcggcacgattacgaccattttcataccaggttacatcttctgagtaaccgtcttcttcatctgtgtaagtttcagaacgaatacgaccaacaactggagtgttcagaacatatacagaacctgtgaaccagtttgttaaagtgatatgccagcagaaatcatctgatggaccgtccggtgtcatgcatggaacgatatcaccttgaactttagacaaaatccacattttctcgtggacagtctgagctttataaccgtcatggtctttagtcttgatagttgcgttcaggttgatggtattcattttattctccgttgtccgtttgggtggtacaggtctatagtaaccttgttgagcctagaagtaaacaacttttttcattctgtggaaaataaaaaagggactcccgaaggagtccctgaacttatgctttcggcttaccaaaacgagaagcatcatcgcgaagaaccgcacgagctcgacgcatgattttctcaaccgtctgattgatacgcttgttcgacccacgcttgtagccagcgcgtttagaggtaccaacaacttcttttactgcagtttttgctttagcttgtttagccattttatcatcttccattttggagaaatacatgggagcacgttcttccgaggttcaacttctttcgacagttctttcagttgtagctcccgcaagcccctaagggtacgattaaactcttatctgttgcacaccgttagcttaaaggttccgggtccgatttctcggggataagatatacaccgatggatgtataggccttgaggcgtactcccgattggccatcgcctcggggtagcatgcacttgccgtttattttctagctgcactttggtagcaaatcaccgatggtttcggatgttttacgtggggataaccaacaacgtccacatcatacgttacccatgcgtacacatggtgggcgtacaaattacttcagcgttaccacaaagtggcgaacagctttgcgagcagcagaaccaagatgcttagcatacttcagttcgtccatcgcttctaaagtatcacgaaattcagcttgtgctgggttcaggtgtttaaaccctttcagaacttccagtgcttctgcatagatatcgattgaagccccgtagttttcgtgaccggaattccatgcattacgttggagttccagagctttagtaagttgtttgttcattgaatcgttcctcaaatgaggttaaaatttggtggacggtaaccgaggtttagctcgggcatccaccgcttagaattgctcgggtagctaatttccgacgcccaattcatattattatttatatacgcacgccagggacttataatgacaagtcacaaacttctgccggatttctttaggtttcttcacacctgctgctaccaacggatgaggtacgtttctgatattaccaacaggcaacggagtcaaatcgcctacctcaacaaatcctttcggtacatcatcaccgatagaatagatttcacacatatccggcagttgtccttgttcttcttttccaagaataataccggaaggagaaacaatttcatcaccttgctgtgcaggttcagatacgagaattacatactcgcctagagctttaattggaagttccatgtgttacctttattgtttgaccatgtagttatattaacatggtcagtttaaagcaaattacttaccgatcatctgcagcagatgctcaactttcataccatttaccgagatcagtttatcaaaggcaaatgagcgccaaccttctttctcggtatcatatacaggaagcgaagtagtgctttctgctcgggcagatttagtagtgctttctaccaaatcagatggaataatgtctttatcacgagtacagcgcagagtacgaatagtgccatcagctttttcaaacacaatctgggattcgcccatgctcagcacagccttcagagtttcacgaatatggatgttttgttcagtagtcagtttcattttgatgtctctttaatagttttgataattacagatttgcgcttggataattcttttaataatcgaactgcttgatcttcaaatttaaatgttgctaatggcttccatttaaaccaataccagcgttctactgagtatgatataacaacatcaccacttagattaagtttattaatttcaacaattctaagtttcattattcaattccacagaattctttaatgttataccagttcaacttgtccaaattgcgttttggaacattgaacacctcaattccagccgaacgaagaatatcgtcccaaccgggttcgttcttgtcgtatgtttcacagtatactaattttttaataccagactgagcgatggcttttgcacaatctggacatggagacagtgtgacatacattgttgctccatcaatactactgccgttcctggcagcaaaaagaatagcattaagctcagcatggatttcattgactttagaccatgcagagtgggctgctcgatgttctttgagcaatccgacttttttgacttggaatccgtcttgacgcaatcccgtagatttgtaaggaatttcaccaatccaaccttgttctgctgcatggtcacaacagttcacaccaccagaaggtgaaccgttatagccagtagaaataattcgtccattcttttcaattactgcgccgactttccacgagcagcattttgactcttgagatacgagatacgcaatttgtagtactgtcgacgctttcatttaaatcaccagataagttgtgttatttgttttaaccaattttaactcgtcggtaggagaagcaaaactctctactcgagaagtacgaatgcctgtaccatctggaaacggatgatttcctcgttcaagaacatcggaaaagacataaccataaagaggttggccttccttaacatcaacgttactgtacaaaatagcatcatattcttcgcgtggaattgaccaaacaccttggtcagaaccaataacagcattaattagacgaataccattttggctaatttccgctttaatgccacgagcatgttcaattaaaagagcttctaccgcttcacgtaaagtcattagatatgtcctaaaatgttagtcatttcaacttggcctgttccggttaaagccaattgagtatgttgattgctctttccattattaactgtaatgatataagcatctacatagttaaaggatgactctcgtcggagagtcactttacttccaggaaccctgtttgctacttcctgtgcgaagattttaaccttcgaaataaattcatcatgcgaaaatttagcatcagacaacataagtttcaacctgctgggtttcaaaattagcaataattccaacgataaaccaatcgtgttcaccttcgccacaagaaattttaatttcagacgagccgcctgaccggtcaatagaaaatttaataacttcgccgtttggaataagtgcattcattgcagataaaaactctgcatgcattttggctacttcagccggagtaaactcatctgttaaatgattagcaacaacttgcgtaaatgatacttttactacttcggaatactttggaaacattatactttcctctaaaaatcaccgtgggctacttgccagcattcaacaccaatacgacgccacatttcaactacctgcgccctgtcatctactgcaagtttgacattataacgatcagcaattcggtcccagaagatttcttcttttaccacatcgtctttgcgtgaatcgccttgcttacgttggaagtgttcgcctgtttcgccaacatggtccaacaaccatttcttcgtaatgcgttgataaacagtagggtcttctttagtaccagactctctgccggaaacagtaagaattttatatcctttgttacgaagcattttaagaaattcaattaccatttcctttggatggtctttaccacatttggccaagtcataaggagaacgatgattgttatctgctaacgtgccgtcaaggtcaaagataactgcttttggcaatgattcgtctggaatgtacaaatcatatggatgcatcttagcatagaagctgcgaagcacttcaataggaactgcattcgcgccacgatagaggttacgattaagcaattcagtccaaggaacgtcaaagcgtttaatttcccacttgacaccatcaatttcgtatgccagctcttgccacttcttgatagtcgttggattaaggttagtatcagcaatgatgacacctttagtggtttccatctcaagcagagtcttcgccatagaaaactggcatacagatactgacttctcacgaagcttagaatatttgtaatcattacgtttatcaaggccaaagatgccttcacgcaaatcatcacgagacaaaacataccaaccgggattagctgctacgtattcgttagcccaggttgttttaccagagcctggagccccttgtgtcaaaaccaattttttcattatacatccttaagagtgtcaataaaatcatgaagagccttagacttttcaccccaattagcacgatatttttctttaattgctcgcaatggcttattcattgacagtatatcatttttgtcataattttcagctgcgcgtccaaacacgatgcacgccaattcattttcagcaattaaccctttaagtgtttcatactgtttttggttcattataatgccatcacttaatacaccgcggttctttaagttcagaacgataataacatatcattccattagcatctttagtataacgtaaaatgtcattcatccagatgcgatactcttgcgactcttcaaacggcataccaacccaggctttaccatcaattacttttacttcccaatgtccttcccatttttgaattgggtctggccactcaggatgcaaaaccgggacatccggtgcactagaagaacatccagcaagtaagctgataatacccatggctaatagacttcgtttcatctggtagcctcctggatatcttctgcaaacttattgaagcttgcattaatctgtttttcaactaacccaggtttagctgcgactacatttccacgcttagaatctttattcatcttagcgttagaagtatcacgagccgctcggttttcctgatagcctttatatgttgtctgcagattttttatagaaacaccgatattttctatttcttttgcttgtcgatcagattcatcttggacgactttgaggtcagctttaagattttctacccgccacgaaagatatttcaatccggcggcggataatgctaacactccaatcatcaaccaagttgtgtttattttgagcatagtttaaggataacctctacgatatcatcacgggataatcccgaaatgaggatgtgacgatcagaactttctgaaggagaacacttgaagcaagcttctacatattctgccatctcagaataattcagctcgcgatgcataatgccaagacgatgcttgccataaatcgggtcaacaattacatagcatttgcatccgttagcatgaacgtttggctgggtgatgttcttgaacacctctgcgccatacttcgcgagatgattatctaggaaatcaatcatttcatctacggcttcaggaagggcttcggcacgctgctcgttcacacgattagtgtactctttttgcttcttacgagcagcttccttgcgcgccatgtgcgtccgtaggtcagtgacgaagcccaccttcttggtaccattccacacaaaaattccatcggaatgagtaccatatttgttaacaaccatatctaaagtaattgcttgcatatccatttcaatatcctcatcagttgatataagtctatagtatcacactctgatgaggatgtaaacaactattcttcagaaatttcaatttctttttcgtactcttttggaacatatcctgcccagtacttcaagaacaccttttcgaggtctttaagcagtttatccacatctacagttccttcgtacatgttcatgataacaccaaaaagatggcgctgattaaccgttgctttctgagcagcaatagcgtagtctttacgatcacgacctctgtattcatcgtagaacgactgacatagctcaagtgactttccgaggtaatctagataagcttgctcaaacgcagaaattttcttaattgcgtattcgtctccagcaaaaagagaacgcaagtcatcggaatttgcagatacgacagacgcaaatagtctttcatttgacgttattgagtctttagtgtgatgaagagcagagtaccattcggttttaaccttaaatctctgtccagtgtttagaactgcaatgtatccttctacgccttcaagcgcacgaactccttcaacccaggtagtagggtcagaaattccgtaagcattaattaaataaggacgaattttagcattagcgtacaaatcatcatatttaacatactcgccggttgcattatcacggacgtttaacacaaacaattgtggctcctgatatgcaagaacaacacgattatcaggtgaaacaaattccatgtttaccgtataaccatctagcgttaactcaagaacgacttgatgaagtgaagaatattcttcgctattaagcagggcagaagaccttctcgcctggtcactgtaaagagaggtttttgatttaagatatagatacccatcatcaacataagatgacactagagagccatcagccttatccataatgtattctacatcgctaatatcaattcccattgtcattgggttttcattcaaattgaagaatttttccatcggacgagaagcaattcgaattggggtatcgccatccatctcaaacatgataccgcggcactcaagagcatcgggttttaaccactcactgtagcttgcgtagtgatatgaaaacactctgaacttaccatccataggaccggtaaaatctttataaaagaattttgcaacttctgagctttcacacagattcattaaatttttatatagctctaacatttctttaccttatgttgtgtgttccatggaggattgaactttttaataaacatcggttcttccaagtccatagtggatattgacatctcgccaagttcattattaatcaaaagattaaaacactgacgagcatagaactctacttttttgccagccattagtgcttcaaaaatcttggcagatttagccgaatcagaggtttggtctttccgattaatagcagttctataataatttatacgtttacgaagattttttgtcttaccaatgtaaactagttcatcatcaactgcgatggcataaactacattcaacttgtttgctatcaaaattggtttgatggtaaaatctggttctaactcaagttgaacatattttataaaagaaaactcgttagcaatatcattcataataaagaggggccgaagcccctttccttataagtactttttaaatccaattagaacatcatcagtgacatcattgtcaatctgagctaccagataagaacttatctcaacttcctgaggagcagattggactgcgtcagagttaagatattcgcgaatccaaggaataggatgtcgagttggtgcatcagtgattgggcacggcagcccacagctacgcatgcgagatacagtcagatagtcaatgaagtcatgaagaattttaacgttcagtcccggaagaccaccattgcggaaaagatggatagcccaatctttttcttggcggttaacttccatgaagattttaattgcttcttgttcacactctttagcaatctcaacccattcttcgccatcagtgccagtttgaagttgacgcagaatgtactgtgtgcccttcaaatgaagttgttcatcacgagcaatgaacttcatgattttagcattaccttccatgatttccatatttttatggaagttgaaggtacatgcaaaactaacatagaaacgaatagcttctaatgcgttaataacatgtaagcaaagataaagagatttcattaaatcacgtttagcttctttaatttcgatattatcttgattaaagcagcgatttttggcattttcccatgcgcgagtcttcgctataacatcatcatagtaaacaccaattgactcagcgcgtttcatgattgcttcatcaagaacgatttcatcaaagattttagctgggtctacataaaggttacgcatgatatgcgtgtacgaacggctgtgaatagtttcactgaacgtccaagtctggttccaagtatctaggcttgggtcagaaataagtgcagataaaactgctgctggggctcgtccttgaattgaatcaagaagagattggtatttcaagttatcagtgaagatattacgttggtgttctgggagtttttcaaactgaccacggtccatcataacgttaacttcttcaggacgccagaagaaactcaattgcttctcaatgagttcctcgaatactttatgacgctgaatatcatagcgtgcaattcctagaccagaaccaaagaacatcggttcggtcatgatatctacttgcttggtattaaaaactgtactcattctatttcctattctgtggtgttaaccatccgtggtctaattataattcccttttattaaagcttacaggccgcgcagtcagcagagtcttgaatcatatcatcgttaccggaaccatcacgggtgttatgatagtaaagagtcttaccaccgaagtaccagaaataaagcaagtcgtccatcattaccgacatttcaactttacctttagggaaattcgccgggtcgtaataagtattagcagagatgctttggtcaacaaatttctgcataatcagaacctggttcagataaggcttattaccctgtttcgcgagctgccaggcataatcataaagggaagcattgtgttcaacatttggaacgacttggttgaagcttccttcttttgattctttaactgacactggtccacgtggtggttcaataccgttggtagagtttgatacctggctagacgattcgcatggcataagcgcagataacgttgaatttcggataccgtatcgcttgaggtcttctcgcaggagttcccagtcacagacatagtttggagctgcgagttggtcaatcctttcattgtaccaatcaataggcagttcaccacgtccgtatcgtgtttctttgtaaagcgtgcatggacctttttcgctagcaagtttaacggaggctttgatgagtgcatattgaatacgttccatcatttcgtgagtaatatcattagcatctgcgtatgaagcaaagttgcttgctaaccaagctgcatagttagtaatgccaacacctagtgctcgacggtctttagcttttaacgctttgtctacaggatagtcttggtaatccaaaaggttatccagagcccttaccattacttctgcgatttcgttaacttcttcttggtcttgccagttgaagttgtcgagtacgaatgctgcgagtgtgcatagcgcgatttcgccatcttcttggccaacatccgaagttggtaacgcaatttcgaggcagaggtttgattgcttaaccgtagccacatcacgaataaaaggaccatattcaccaacgttatctaccatatacgggtaaattcgagcagtaccagcacgttcagtaaggaacaactcaaacagttcacgggctttaatacgtttctttcttacgtctgggttcttttccagctcttcgtataaagtacggaacgcttgagcatcacggaagtattctgtgtacaaagtaccaagacacacatcgggactaaacagagtgatgtaatcattcttaatcaagcgttcaatcatcaggttattaatctgaacaccataatctaaatgacgaatacggttttcatctacccctttgttgttcttaagtacgaggaggttttcaacttccaagtgccagattggatagtacagtgtcgccgcgccaccacggactccaccctgggagcaggatttaactgcagtttggaagtgtttccagaaaggaataactccagtatgtttgacttcaccgaatccaatttttgaaccttctgcacgaatcatacctgcattaataccaatacctgcacgcttactgatgtattttgtaattgacgcagcagcttcattaattgaattaagactgtcaccgccttcaataaccacacatgaactaaactgacgtgtcggagtacgaacacctgacataattggagttggcaatgaaatctttttagtagaaactgcatcatagaaacgaataacgtttgctaaacgattttcgccatcgtcttggtgcaagcacataccgatcagcataaaggcaaactgtggagtttcatacaattcaccagtgtgacggtcttttacgagatacttctcgataagctgcattgttccagcataagtcatagtgaaatcacgctcatgcttaatataagaatcaagcaaagcaatttcttctgctgaccatttgctcaggatttctttatcatacttatttgcgttaacacaacgagaaatgtggtcaataaaagcaggtggctcaaactgtccataaacacgcttacggatttcaaacattgctgcattggatgctacatattgataatccggttcatcaatagaaatgctattcgccgctaccttaacgatagtcttttggatatctgcagtgctcatgccatcacgtagatgggatttaataatttcatataactcgtatgggtctactttggttccttcgcacgcccattcgaggactttaatgattttctgcatgtcaaattcttgactaacacctgagctcttaattacttgcataagtcctctaattcaaatgtatctttaaaaagtttattcactacaagagctattatatcaccatggcaaggaagcggtttgcaggtgcatcctaatctcattcctcttaaagtttctaagtgctctcgctttatttctccgttccgaatcttagcaataaaatcgtccttaaatgccgcaatagcatcaggacgattatcgcaatctttaccgacgtaatttccccacattgttccacgttggatatttacatcgaagtcggaatggtatttattaaccacccgacatatcttcatgttatatcaacttcaaaccagcagattaattgtgttttgccaatagaccattcatatgatttaatgacagataaaacgcgttgttcgatcccgtcaaaaactatcttgtcattaacttcaggcaaatcactagagaatgcatcacacatctcgcctaatattgtttgtcctttacgaacaaatcgaatattcatatagccattttccccttaattgttggatgggatttatatccttcaagaacaaagtcagatggtttcatcattcctgtaacccaagctaattgttcttctgttgctaattcatgaaattctttatcttttactggaggccaataattaatttcaagttcacacagctcttttggctctcgtcgcaagatttctttacactgttcaatatggttcagataaatgtgagtgttaccaccagtgaataccaaatgcccaggtttaagattggtcattttagcaatgatatgaaccaatgctgcatatgacgcaatattgaaggggaggccaaggaatacatctacagaacgttgataccactggaggtccaaatatcctttacgaacgttgaactgataaagcagatggcacggtggtaatgccattttgtccaaatcaactgggttccaagcggtcacaatctggcgacggtcagttggcaattgcttgatacggtcaatgaccaattttagttggtcaacgcccatgaaatcacgccactgtttgccatacacagggcctagttcaccaccagaatatcccatgtcttttgcctggttttcgtagttgtcgtcccagacagttttaccttctagcaatgaaccatgctgaataagacgcaattcatgaacattagtagacccctgcaagaaccaaagaagctctgcaatacatgctttccatgcaagacgcttagtagttacagcaggaaaccctttttgtaaatcaaaacgtaactgagtaccaaacttcgcaatagtgccggtaccagttcggtcatccgtctcataaccgttttcaaaaatgtctttaattaattcttggtattcacgcattaaatttttcctgaagaggagtaaagaaaagctgatcaccacgcttttcaaatcgcccaataatagacactacatcatctttgaccatcacattgccatgtgacattccgatgaacatcttcttataatcacgttcaatttcaataggtatatttccatttcggttatatactgtagttgaaccgttataagtgctaagaccattataactgaaaactagaagatgaataccatgcttaaatggaaatcttttccacctcttttggactttgtcttctgatagctgagtgatatcatagtttgcgctcatagaccacctctgaaatgttagtcacttcatcaatatgataccagtgattttctttagtaatgaatcctgattcttgacaagtaggagctgctacaaattcagcaggtagagtgacatcagaattcactctatgactttttctgatggttgtttggataaccctatctgcatatggatatgccttctggatgattccggcaccacctatgatagaataattaaggtctctattaaaagtgatagtactgttgtaagaagtatgagcggccataatgtcaccacccaagaaaccgataaattctaattcacttacataagcatctgcaaagaagccatttttagcagttgccaacgcacgactcatgtcttggacaacgattgtcttacgaccaggaagaggtttaggaaaactcataaaagtctttgctccgcaaatcaagatagtatctcgagtacgattagcaaagtttttcatgtcctgggaaatatgtttccatggaagaccatcgcctaaaccgaaagcattttcatttttgccgtctacagtttttgtaggagcaaaggcataaactatttgaatcatttaaacctcagcaaaattcaactcgttcaacattaccatcttcccacttctgttgaagctcttggagacgtttgatagcgctatcgatattggacattgcacagatagttacccattcacggccatcccaccaaatcaaatcatcgtaatcatctactgcgaaattttccattaaccttgcctcattccacacttaaaacaccggccacctaattgccataggctaccgccgcagtacttacaatcccagtcagttaaaatccacatgacttgtacccactagctttaatcatgttctgaagagttttaaacccttctttaatggcttctgaaatttcctcaaatacttcctttttaagaatatacaacgaacccgcttgattgccagaaagagctgaaatcacaacttggtcattaattaaaaattcgccatatgctgaatcaattttacctgaaacctgattgcctcgggaatgagggtcaaatacgagctcaatatgagttactccaggaatttcatcaaattggcagcgaatgttaacacgcggatatcccgttacactaaatttagacatataaaaataatcctaatataatgccgctaataaaagcggcagtaacagaaattagcaaaactactaattcagcctcaatcatttcttggccttagcaagtttaaatgcttttttgaattcttcaacatcttcaacaggaatccaaaagcctgagccatacccatcttcatagcatgggcagttatcacagtaatcattccaatagacagtttcaccacccatagtgaatggagcttccatttggcacagtacttcttcaacacgctctaattcttctgggtttttatcgcaaatgcagaaattccatttaccacgatattcagaaccaagtttgatgctttgacgttgaagtttcatttttattctccagtagattatggagctatactatcacaagcatagctccttgtaaactactttttgaaaacttttttgatcaagtcaatcatttcttctgcattttctggggtaacgatcaagtccaagcgagtaggaccaggttggattgcactaccaatttcatatactggttcgaagtatttgaattcataatcagatatttcaaagtatgcatctccaaatccttcagcgtcagcagttgttccatctttaaattttacttctgtgatgaaactattatcttcgtcgagcattttagtaggaaagaacgaaccaccatgttcttcaatcatcaagcgcatccggcgatttccgctagatgaaaggtcccactcggcagcaagacttgggataatgcgatattctgtgttcagtttcataatttacccgctaaaagtcgttaatgtatcttcacggcattcatcatccatgccaggaaaatattcttgttcaagccataaccatagggtaggagtatcaccttctaccctgatttcatttcctccccatggggcaggcttgttactaacttcaatcaagccgtatttttcaatggtttcaatgaagtgttcataatcatatatttctacagtaacttgtgccattatcatttcctcaaagtgggggaccgaagtcccccaaaggtaattactctttccagtcttccatcatcaaatcaatatcttcccactcgtttgcttctaaccaagcacgaaccgcttctttagaaccacggaggtcaatatttggccaaccgccaccagggccttctttaataactaaatcaaaatcaataccatggtcagtgtcataaaaacgtgaaccatcttcaaaaatcaaatcagtacaaaatcctgatttattgatgtaaggttctgccacgatatcaatgtttaatttacccatgatgttttcctctactcgttttgtttcgatgtagatatagtatcactcatcaactagcttgtaaacaattttgtgaaaatatttttggagggataaagaaaaagggacccgaaggtccctttatattagaggtcgttcagaatatcattcagatcgtcatcgccaacactgtcaccagcatcgcccatgatatcgtctgcggaacgagaagaggtcggtttggattcaaaatcagacaggtctttgtcaaaggaatccaggtcatcaccaattttatcggcttgagctgctgctttcgccgcggcaccaccaagagctgctgtacccataatctgtttaaatttggcttcgttaacttcaaacgatttaaactgggatggagccacaatttcgctgaggtcagccatattttcggtcaggaatttctgagtttcttcatcattgatgtttgcaatctcggactgaccaaggaatttacattcatcatagttctggaaaccaccgactttcttaactttcatgacgaagtttgcaccttcatacacacaagttacatcaaccggagtttcacccatatcaacatcgacttcaaccatcgcgttgattttgtccataattttctgaccgaaacggaatttgaatactttaccttcgttttctgggttagccgggtctttaataaccaggatgttagaccagaaagaagttttacgtttcagaagcttatattcagccgggttgctgttataagaatcgtttttactcagatgagcacaaaccgggcaagaatcaaaatcaccgtgagtagaagtacaattttcaatgtaccatttaccgccgtgtttgaaaccgtgattgatcagttttacaaacggcagagagttttcatctttaccaggcaggaagcgaattactgcttgaccattaccagcattatcggtcttcagtttccattcgtttttatcttcattagagaaagaagaaccacctttcagaccagccagttgttgttgaagttgagcaggatttttacgcttaaacatatgattacctttttaaatttaacagttgttgttgcaacatgggtccttgcaactggacgatagattaattatatactaatttctttacaagatttgattatgctaataaagagtttcttagcttcagcaccgtcaacgtttaaaagttttttataagcttttaatttagtggagtaattactccaaactaagttatccgttgcagtatcatgtgtatttattatatctaaaaacgagtcaagcatgatgaatgtctcgaaagatataacgtttgactgaagaagtttgaacacataagatgttccgactttctcattatattcaaaaatatcataaagcttatctacattaactttcttggcaaaatagtaaatgttctttacgtcttcagagaatgtagttttgatttgcttcaacttaccgatgtattcacgataaaacacgagggcatcagcatcactgatatcgccaatccatgcatcttggttagctacgaggttactcatgaatatcagtgttaactcttttaatgtatatttctcagcgagtttctcaaagaaatatttgtctctacgcttttgataagctttatcagagacccgcataacccagttatacttaacaacgtcatatcgaccggcaaagtgttgtttgagcattaaatataaaagataaacgctcttaccgttaacgtatctgttattatttccaggcatgcggagacgaatcataataaaaagtccagactattcgttttgtgtgtttgactaaatgatggacgaagcatattttcttccaatgcttctgacataattttttctatgattgctggaggaatatatctattgaagtttccctcaggaatagaattttcttctaaccactgagttgttgcttcaagataccccattccaagttctgttaccatagactcaatagtaaatccgttagcttgcttatctaacagctgattaatggattcagagggggaggtatccccctcgtctttaagcgaaaatagagtcataagcttctaccacttcatctttttcagtttcaaaacgatcgcgtgtgcctttatggaacagagcaagcagttgattaaacagtttgccttctacgccaagttctttcttggcgcggtctttaatgtctttgttaagctcaagatagctttctgctttcaacttattacctgaggcttccttaatcatatctcgcagagcctgtccgtgtaccgcttcatcaaatactacttgctctttttctttcttagccattatattcaccttaaaagttgttaatttctttcattaatttagacagaccggatttaacaaagtagctataaattttaccacgacccggtaattggtagttattataacaatctaaaatgttagcaacaatgtcttcgcggatgtaatcaaaatcgattaacacgcggttttccaagaaacgcttatactgttcttcagtaagcaaatctttaatgttttcgccagcatcaagacattcttcaacaaatgtcattttcgttgaaggagtacgctcaccatcaacatgggtgtaccaaaaatctgaacgaactttaatagaagcgacgttatctttcttgtcacctttaataattttaaccatgcaatctaaagcaggagagccggttttagatttcactaatttcttctgcattggtgaccattgcttaacattaggatacttatgcaattgagtaaagtcaccatcagaagaaacaatcataacaggatgaccttcgagactgaactttttggtcagtacagcaatactatcatcagcttctgctttatcaatatcaatgacgtaataaggcatatactgcttaaattcatcaattacagtacgaagaccttcaaagtaaccttcccagtcccaattggattcttcacgggctttagcacggttctttttataataatatgctacatcccggcgccagtatccgttgattgcattatcaacacaaatgacaattttagtatatccatctttcttccacttaaaggcattaaattttaaagtagaaagaataagatgacgaaccataggagtggttagtttatcgccttctttatacgtatgaagaattgtcgccattgcgatttgcgacaagtcaatcagaatgacaccttcttttacttggtcttcttcggcgaataagcaatttaaatcagacatttgaacctcgttcaattagttagtacagccattataaatacttctataatgaagcataaccccataggagactctatgagcgatttactgaaacaacatttccgtgcaacgaacggcttggacgcaggcggaaataaagttataaatgtggcactagctgaccgcaacgttaaaaccgacggcgtctccgtcgagtacgttattcaagaaaacactatccaaaaatatgacccgacacgtgggtatctcactgattttgctgtgacttatggacgtcgtatctggattgcaaataaagatattccaaagcctgctggagattttaaccaggcgaattggacttctttacgtgttgacccgaactggatttataccgtccgtaaaggagagtttgaaattcaatctggtcagttcatcaacgttgactctaacgctgcaggtaatgctacattactgcttccgttagcaccggatgaaggcgataccatcgtagttcgtgatattggcgggcgtcctggctataacggaatcttaattaaagcacaagatactggtgcgtctatcgtatttggtgaatcgcgtctgcgtgaggtaagacttacacgtccgtattcacaaattatgcttacgtttagtaatggtgcatggcgtgcaagtttaaccgattttggcgatactgctaaaatggtagttccgaacgggattgttccaacccaggtacagtcaggtgataacgtagttcgtcgttatacttccaactcagagattttcattactctgccgttgttcgctaattcaaacgatatcatcaattttactgaccttgacggtacatcgccaattaaccatatgactgtgcgtacgtttgacccaactatctcaattgggactcctggacaaacagaggttcaagtacgtacttcaggtaatgggtttttggtatatgactcgattgacaaaatctggcgtatttttgaaaatgatttacgcacccgagtaagaataattacttctgatgttactttaatgcctaatgagcatatttctgtatttggcgcagataacaatactgttaaaacaattaacgttactttgcctacagacgtagctgttggtgatactgtcacaatcgcaatgaattatatgcgtaaaggacagactgtagtaattaaagcttctgatggtgatactatcgctagcaatttgaatttactgcaatttccaaaacgctcagagtatccacctgatgcagcatgggttcaatcaagctcgattacctttaacggaactacgtcatatgttcctgttcttgagcttgcatatattgaagaaaaagcaaccggaaaaagctattggattgtaactgaatctgaccctaccgtagaacgtgttgatgctaaagacaacactaccagagcacgattaggtgttattgctcttgctacacaggctcaagctaacgcggagtcaaatccagaaaaagaattagcaattacgccagaaaccttaaacggacgtcgttctactgaaactcagactggtatagcaagaattgcaacttctagcgaagttaatcaggcaacaactgcttcttacttggataacgtaatcgttactcctaaaaagcttaacgaaaggtctgctactgaaacccgtagaggtttagcagagattgcgactaatgctaaaatggatgcaggaacagatgattttacgattgttactcctaagaagttgctttatcgtactacatcagattcacgattaggtgttattcaattagtaaaaactggcggtgctcctaacacaactgctgatcgttcttctgctggcaccggtatattcgatcattctgattacaaaaatgcagttactccaaaaactcttcgcgagtataaagctactgtaaatcagtcaggaatagtttggttagcaactgatagcgaagttagaaacggaactccggcttcttcaaatattcctacagtcgttacgccagaagctttgcataaaaaagttgctactgacggagcaattggattaatccaaatagctacacaaactgaagttaatgctggcggcgtgactaataaagcagttacacctaaaacattaaatgaccgtacagcaactaacgaccgtactggtattgctcgcttcgcgacacctggtgcccagggtgaatttgaagctggtacttcaagtacagtaatggtaaaccctaaattactgttcgataaatttgctaatactgatcgtatccaagttaatactagttctggcttaactattactgggaacctctgggaccattataccatcaacatacaggaagcaagtacttctcaaagaggtacaaccactcttgctactgctgctgaggttagaaccggcaccgacgccaagaaaatagttactgctgccacgctacatgctaaaacagcaactgaaggtgctatcggtcttgctcagtatgctacacaggcacaagttgatgcaggcacattaagtgatagaattgttcctcctgcttacttgaaacaaactattcaggtaacagagtcatggcaagctacagacagcgttagagggaccgtgaggctatctacaggcgatggaacgtggaaaggtaatgataccaatggctcaactcttccggataacgggtatgcctctaagggcgtcgcagtgtctccgtatgaattgaacctcacgttgaaacattacttacctcgtcttggtaaagcctatgacaccggaatgctaggtggtcaaaccccagacaaatatgctcgtcgcgatatagcgcagactatttctggagcttggtcatttagtcaggacacttcatttagcaataatatttctgtccagaatattatatatgctaatggtggcgaagttaaaatttctccaacagctgatactggaaatgtgcatgttcgttttcaaaatagagacggaagcgagcgtggtataatttatgctgagcctcaaacagcttcagccggaaacttaaaagttcgcgtaaaaaacggaacaggaactactgctgcaagccagacctacacatttggcggtaacggtacgttagaagttcctaacgaagtgtcaactaaaactctgaggtcttctggaaatgcaatagttggcggaactgttatggttaaggacgttcagatgcttgctgtcgagggattgaattcaatattcggtgcccaatcacagtccgcatttattcgttcccgtgacgctgatacacaaatttttgcacaggattcaactggatcgtatccaattttaactaccaaaaactatgcaagattagctgatggtcgttatgttaagaaagctggtgataccatgaccggcaatcttaacttaagcggttctgctatcgtcattacgggttctgaatcatggtatgttccaactaatgaaactgtactgagacaaggttcttggactgctgaaattaaagacgctactaaattacaaggtcttcgtggttatatggttccaatcagaacaccgattgacccgggtaatccaagcactttagtagtaaccggatatgaagaaaagactgccgccggtggtgttttaactcaggttggtgtaactacaaacaatacttatcagctttggactccttatcctccgacaaccgaaactgctgataagcgtttcgcgcatactgtgtggatgaggatttataatccaaaccttaataagtttgatgattggatgcgagtatttacatctgctactcctccaactgcagctgatatcggagctccaagctcagtatcaactcaggttaaaacccttgaagttttggaatggattaagcttggcccagttaaaatctggccagaccgtccaaatcaaactctcaaatttgaatgggtaggtgattaatggctgaaccaattttaatggcagcctttggcgaggatttcgtggaaacacgaatcctctctgaggcaaattcggtgaagtattggctaaaagcttatgctacacattctaatgctgttccgaataagccagagttgaatattaacggtgcctttgatatgacctcctccttacggagggggattaatgtcgttcaggttaacggcaatagttttattaactttaaaacttttgatgttaccactgatgataacaacgctaataacaaagcgtttgtagaatatgcaaatggattaacttcgggattgtatattataatgacacatgaacgatttcaatccagtccgttaatagacagatggtttaaaaataagtggtctgcttcttggccaggttctgatttttccaaatcatttccaaactccgcctatgttggagtactcggagcagcaaaaggacgtatattaattgagtcattttacggaaatgatggtgtagttaaagaagattccagagctaaagtagatacagtgtatgataacgttggcgatgtaggatataccggctgcccttatcgttccattgaagacactaatgagtactcggattctactggatatgaatataagcgatatccagttcaaaatgaatctataagcaaaatcgctgattatggattatctcccggggattcggtgtttttagtgtgtgatatgtatgcatctaaaagccttcttgatgcgggttctactactagagctagcttgcggtggttcaagggtacatctttattatcttcaagcgtatcattagaaattccaaaaaatggagctgatagatggctaagatttgaaagatttaccgctgttcctacggacgctgatggatttactattgtggtatcacgatatccaaaaacgtctgtaattggtgactctaaaatcaaaaaccttgtatttgttcaaacctctcacagcgaaaaactgaatagcgttgttcaagagtttggtgtgaatggtataagaatgaataaaggcgttgaaggaggaaccacagtgattatggaacttccaaattcaaaagtcgatccgagcggtgttattccagttcaatcgttcagagaaacatcagactaaggaagccttcgggcttccttttttcgtataaatagaaaatatataagaggataaactatggccgatttaaaagcaggttcaacagttggtggaaatcctatttggcacgcaggtacttttcctcttgtgccggcaggaaactccctaacttatagaggtgtaaaggtttatactgagatagataaacctcaagcagatgataacgactttgtgtctaaatccagaggtggtacatatgcaggcgaagtaaaaatagcatatggagctgctggtaaactgagcatgggaccattagcgaatgttggtattagagctggtggtagtaatggtgaagttcttatcatcggagggaattcaacaattcaattgcgcggcggcggaacggaagattccagcggcatagttgaaattgctaaaaatggtaacttaactgcacagactggtagaattaccgctaacgtatttacttctaaacaacaaccatctggtgtagacgatttaactcgtaaagattatgttgatgggctaataaatactgttagcaacgtagctaacgccgcagtcaagaaagctggtgatactatgaccggtgtacttagggctaacgctggcgtagttatagtaaataaagcaacatccggtgaatatgctcctagattagatcaggttatttcacgcggggtaacaatagattttggcacatactaagaggtagccatggccgatcaaaacttaaaacaaatacaatttaaaagaactagcacagagaataaagcaccaggtgcagatatcgtagcccgtggcgaaatcgctttgaatacacatgggcgtactcttgccatttatactaaagatgaaaatgatgccgtagtacagctcgccggtaaaggggttcctttcttagatacctccggaactcttagcgttgatggaactactacgttaaaagacaacgtaactatttctccgaataaagcaattagttttgaaactactgatttgagcggtgaaataactcgtcatatcgttggcaaatgtgctactaatgatggctggtacattggtgccggcggtacaagcaacagtggtattcttgaaatcggtactattgatgatggcgctgaaactattcaattcgtacaacgcggtgcaggcaacgttgaagcccgaaaattggtcttgcttgacggctctggtaatacgactcttcctggcgatttaagattatctaccaataagactgttaaaattaacagtggaagcactcttgttcttgaaatgggtgtaggctctaacgacgtctatattaaaaaccaaagaggcacgggtgttcttcaattaactaatgacagtaatttaacgttcagaaattcacaggtgtattacgctatgagcggaagaggtcctggtaaatccggtactcttctgacgaatgtagaaaacaatcgtcaagcctggcaatatactatttctgctgcaactgcgtcaactgctcgctgggtaaaagtagctacaataaagcatccaggaatggcttcttcgcaactggatttaatgattagcggtggtattgattctgggcacggtagacattacgttgattttatcacgttatcaggacgaaatttaacatcatggagcaccaacagtttagataactgggttgaatggcgccgggttgggtctccttctaaaacgaacgttccagagtattacgttgttaaaaacgattctgctactgatgcggatgcgtcatttgatttttatgctaagattcctcgttatggcaatggcctttatgttacagtgctaaacacagctggatacaacggccaagattcaggtacagtaattatctatgaaaccaatcaggacactggtgatactggaccgtctggaagtattcttgtttcaatgaaacagatttttgatagtttagcaaaaccagatttcggcgatactacaggtactcttccggttaaccgaggtggtacgggtgctactaacgcaggagacgctcgaaataacttaggtcttagaactgcagctgttcgcgatgttggtgaatctaacggaaacttgatggaagttggtgcctttggtattggcggtaacggaaaatcactggtagatattacttctgacgttgatttaatgactcgccttaaggctcttggtggtacagtgttcagagccaacacagcgagtggttatactggggctccttattactcccatggcaccgggttttatggaagagcttctgacacaatggctgcgcttaatatagattatgcaactggtaacgtcagagtatttgctataaacgatagcggtttagcaagtggaagagtaaattctaatgttctctacggtacagcaaataaaccgtctaaggctgacgttgggcttggtaatctgacaaacgacacccaggttaagaaagctggcgacaccatgactggtgatttaactgctcctaacttccacgcttctggacctggaactgcatctttttacgttaatgctgggactggaaacgctcatgtatggttcagaacggatgctaacgaacgcggtgtaatttgggcaactccaaatacagcggacttaggacaaattaatattcgtgcaaaaactactggaggcacttctgccggtgattttagcttccgttctgacggtcgatttgatgttcctgtagcagttaaagttggtggggcagcaatgctaaccaaagatgggaatattacctctggttcaatgtttggcggtaaccttaacaactatttgacttctattaaaaatgatatcactgctggcgataataagcaagtaagcaagactggtgataccatgaccggtaatttgactattaacgctaacttaaaagtcgaaaaccctaacggaacttttgttgatttaggttcagagaactcagacaagtacagcagattgacccttgcacgtaaagctggctctggtgctgccgtagcaatgcttaaaatcactcctgaaggatacgtgcaatttggttatcaagatgcagttgctactccgtctcctagcaagtacatccgagttaaacctgatggtcttgatgtagaaggtgatttggtttttaatcagacatatcgcggcaccgaagaggcagttgatatttctgataagactgttgaccttaatagcctggttattaaaagaaccgacccaggtactcgtcagctgtataaatgtgtatcttctggcggcggaaataatatatcgaacaaacctacctctgatggcaactttgttcttgaagttctgtctttacgcaaggtttctgataccgattggtcatgtaaacaaacctttactacaaagaatggcggtgttgaaggtacatatatccgctacgcacaaaacggctcatggtctgcgtggaaagaggttgttgcgggtgttcaaccgattaatttaggtggtactggagcaacttctgtagctgctgctcgtaataatcttggtgttggtgaaggacaaactgtatcattcggtaatttagttaccaacgacttaactgcaaacggaaacgctagattggttggaagactgaaccttggttctacttctgcgactggcgtattacgagctaatgaaactggtgcggttgtcttaggttctgctagtggtcaaaacatccacatcagagcaggaagccccgatacttctactggtgaaacccgctttgagccaaatggaaacgttttagttggtggagttctgacgtcttcaggaagcttgcaagtaaatggcgaagccacgatgggcagaagcttgatcgtttctcaaaacataaagaatactaacgataatagttttattctgatgggaaaagattctgacctgggtttcgttaaaaaatctggtgcaggttctaaactggtctttgcttcaggaaaaacattcactgttgctaaatcatcagcaactgccatagctaatccagcttcggaaacttacactgatgtgtttaaagttgacgctgatggaaaccaaaccgtttacggaaatgcccaagttaacagacagttaactgtttctagctcagcaactgttaatggtattattaacgcaaacggcggtattattgttcctactaccaagtatgtgcaaattgccgatgctcctacacagaataaccaagccaccaacaaaaaatatgttgatgacaaggttgcttctgctattagtaatgctggcgacacgtatcttccgttggcgggtggtactgtaactggtccattaaatattactggaaaccagttaaaaaccacatcgctctgggttactggaaattcggctcttaatggtgctttagaagtaggtggtaatgttgttagtaatactggtattggcagctttattggtgctgtagatgttaaggctcctgctgcagataatggtacaacacacctttggttccgacattctaacggtggtgagcgtggtgtgatttatatgccgcgtgacaataataccatgatgggattaagagctggcggtagtgagtggcaattggatggtccgacaggtcaaatgctaggaccaggagcacggtggagaattcattctgatggtaacctacagggtgatgtttacggtggttatatcactaactatatcaacgataggtttaaccaatgtgctcaatgggttcgtactggtgctcaacaagactttggtccaattggtcgtccagcacctggtaaaactgttcctggtggttgggtgcttgttggtcttaatggtaacagcaacgaagctaaccagaacatgcaacttatcggcggacggttacaggtatggaaacccggtgtcgaatgggttgattctgcgacttgataatggaaggggcttcggcccctttaaacttaagggtaatctaatgattattaaacaaatgaaaggcattaaatggcaccacaattttgagggtggtgcttattatcgggactgtaacgataattgttggtacaaatttagaaattctcttgataagaattctcatatcattatagttaatgctaaaaacagcaagataattaattactataatggcgaagatccaaccatgatcgggttatttgccgataaagaaatggttttggatgtatatcaacttgatgattttcctgttgattcgtggggcgaattcacacaaagagaatttgaatttgtagacgaacaagttgtgatgaccaaagatgtacaagttcctaaagaaagaactaaagatgatatcatgaaagatttaatgaagcttaaagctgaattggaatcattgcaataaatagctctgtaaggagagcaatatggcaagcaaacaatcaataccgttttttgatatgtttcttgggttgctcgagctattattcaaagatggagccacgggaagagttctcttttcccgtgttttcgttgtcgtacttttagcactattggcgtttgctggatataagtctgatagtcttattacagcttacgtcgacagtacttatgacaagtatgataaactggttcaaaaggatagagattcccgatttgataatacagcactcgaacaactccagatagtacatatctcaagcggtgcagacttttctgcggtctttacgttcagacctaaaaacttgaactacttcgtagacttaattgcttatgaggggactttacctagcacggtagattctaaaaacttgggaggatatccaatcgacaaaacaactgctgaatatagcacgcatttatcgggtagatatttttggacggataaggaatttgttttcttaccaacaaaaagaaaaccgcctgaaatatcgtatatgtttagctgtccatatttcaatttagacaatgtttatgctgggactgttgaaatgtactggtacaattccaaacctgcattatctaacgaaagactaacatcgatatgtggtcaggcggttagagctcttggaagagctaagtgattacttattactatgcatagccattgttcgatagatagactcaaatccctcgttgtattcttcaacgagaattctcttctcttcgtcagttaactcagaaaccattttacgaaagttgctctgatttaactgacgcccctgctcattcttgattccaatttcattcaagaacgcaataaattcatctcgcttctccatgatatgttcagcattgaacttagtcagaatagaagcaacagtaacgatttcttggacaatttcaaacttagtcattatttttcctacaacataatggattatgtgattatagtatcatcttgataccgtgttgtaaaccagtttatgccaattcccaacgagaattcaaatcttccttggtagtgatatactcagcaccggaggacatccagagcccgtagcgaccatcttttactttagccgttaaataccattcctttccaattggacgaaccctacgattcatccagtgacatacgtcaattgcctcctgaaaagacaagtcaatcagacttccaagcgcgattttattcattaacgcttcgagatatctttgtgattcaatgacagattctaggttatgactcatgctaaaaccacctctccgcgattacctaaaatgctttcgatatactcaactccacttataatgtcacctctatcctttgctttaatagtaataattccatacgtgtaaaagtcggctgacaaactgaatggcttagaagtgtcctggttaaacgtagacattactgcttgctctaaatgttttacttctaagtcattagcccaagagttaagaactttaagcctaacttgtaaggtgtattctactttaattgctgaaagcaattcaacgcgtttatgatatgccttggcttcatcttctctgcgtaaagtttcagtattcatagataatctccaatatcataagcatcaacgcatttctgaaattgttcaagaacttcttcaggttcaacattagcgataatagctacagtaaaggtgccattattccaatcatgtaccatccagtccccatatccagcactctggaggtcttccattagttcagaatggatatctgctactaatccagaatggtcccctaatttcttatggagagcttctaggtcatcacacataatagttaaagtagtacatttggaattattcagaatgcgcattgtctttacctttgtgtttttgcttacgttttgattctttggcagcacgctttttatctttatgtgcgcctcctttgttaaagtcattcttcgctactgggttgtacatgtgaaattacctcatttaagcagttgcgtgtaatatcaaaacgcttagcaataccacattcttggatatgtgcttttaaatctccagcgtgcacatatcccaattccaagataaaccgtttaatttgagccttttctgaacgatttaagctgttgaagtaatctgccttggcgcttattgttctcacgctttatcttccttacattcaagttccttgatgtaatagtcaatatctttaatcatttcttctgtcattattttgtacatttcagcaagaaatggtttagcaccgccattaaatggatggctaaacgggcagatgtattctttatccatgagagttttcatgaatttgctgtctgccattttaaatccggcttcattggtatatgtaccccaattattgtccatcatttctaatgagcgctgaagcgatttacgttgaatttttaaaagcgtaatgttattctttaatgtactaatcattagtataaatcctctgagaataattcattggctggtcctgatttaggacgaactgtattaacttgacctgcatgcgtagcgatgattaatgcttcttcacgtgtgaagtactcgccccactggtcaacaaatccttggttgtctccatggacatggtcagaaactaatttgtcacggaacatatctagaacgttcgccatatcaacagaatagtggcgagtgcctggaactacaattgttccaccagttttcaattcaaaacgatttgctgcacaaacgatacgacgttgaagtaatcgtccatcccaccaatcagctactttaaagcagatttctggaatttcgctatttacattacgcatttgactaacttctcgttaaaggttttaataacttcacggccatggtctgcacctttcttacagtctgcaattgtccatgcttcaccgttttggtatttgtgaagagcccgggtattaatatctttcacaagattcataatcaaatcattaatttcttgttcagtcatttaaagaatcctttaattttctgccacaaacttttcttttcacgaataccaatttgacgaataacaggttcaccctgcattttctctaaccactccattgagttaacagcttccgccattggaacaaatttagcaagggccttttggtaattatctacatccatgatatgtttaccatctgcattatagatagcatagcattttgcgaatttcttatcaatgtatccgataaagtgcccacggaaccatacatcccaacaatcagttgggatattagcattcaagttaactttttctacacaacgctgaagttcattcaatactttaaacttgttcattacagttccttaatagagcggatgatggtttcaatgttttcggcagtacgggcgatatctaagtaagtattgcctgttgcagctacacggcaagacattccgaggtcagtgaagtgtttctgatgctcttcagaaattttgtaaccgaagatacggaaagtgcctttgttgttaacttcaagactacgaataccaaaggtacgtttttccagaactgcgatatagttactacggtaaactgtaagctctttcagaggcaagatatcttccatctcgctaagaatgctcatcatcaagtctttatgttcattcatgtcttcagtcagaggacgagctttacgagtattgcgtttcttcagaagctcgggtttattttcttctgcatagataactgctgctttagagatgatgtcctgtgcttcaccggtgatgattaaaccgtcaccagatttctcgatgagacctttcttaatcagaacaccgatgtttgagttaacagaacctgcgttcatggtttcttcaaggatttcacgcagctcagcagaagtgatgaaatcttttttagccacctgaaccaggatagcagcagttttctcgttcagagcatcttcggaagctttgatgatgtaagttactttagacattgtgattctccatgatgttttattcaatttgtttggtatgagactataatatcatctgctaaccagcttgtaaaccattttattctgctctctgaaaaattttcttcaaagagcagtaaaaatgttatacgttaaagatcaagaacttatcgccattctcaagtttaagcacccagaaatcatcatatacacaaagaacgacttgatactcttcaccgtcttcatagttactcgcttgaattacctggcgcataggatactcgcgattaacttcgaacacatcaagcaccacaatgttacctttgacatagtggctcagtcgagtgccatcagcttgagtagaaatataaagaatgtttttgatatcagattttaatgatgtaatcattttgttttactccgtggtgttttgatattgctataataccacaaccgagtaagcatgtaaacaacttgtgaaaataatttggggcattctaaggagggattttggagggatatagatttatatggaaggacctggagatgacctccaggttccctagattaactgaggagcaataaaactagacctaatactgtaattatagaacctataattaaataaaattctatcataattcttccaggtcttttagatactcagcctcaggcgttgtcttttcccagtacttaacctcttgtgctaggcgttttgcttcctgagcaagtttcttcgcttcatcatcagtgatgtgatagatgttcattgaaacaagtttttcagaatggtctttgaatagttcattctgttcaatttctttagtcaactgcttacgagttttaccttggataacgatgttacctgcgataacctctttgataaattgagcttttgcctgagcaagattaaacgcctgcttagtttcagcgattttgtgctcaattcgtttggcggtgaatgtcttacggacttctacaaaatgacgaataagctcacctgaagttttgaacttatcgttcagtttaccgttctcgtcgatgactacgatgtactgactcattttctcaatgagtttaaaatccttcatgattttagcatgacgttgctcagggtcatcgctcaaagcatagtctttacggaatttcaccttaaagccaaacccggtcttagaacagtcatcatcgtatgtgatgtatcctgcatcttccaacgggtcaagtactttttcaacgtaagaagctcgttcaaacttgtacggaatttcactgatatagattgagttccgtgaagtttctttatacacgccgtgcagttcaacagaaccgtcttcggtttgaacgatttttccgttaaatttagggaactgaacttcaggttccataacttcgccacgaagagccgctttagtacattctaaaacagattcaaagctgtgtggaagaatagaagttgaatatcctgttgcaataccacgaacgccattcagaagaacagtcggaattaccggaagataatacgcaggtggaacatgttctttgtctttatgcaccggagcgatttctgtgtctttgtagattttacggaagttgtcagaaatccggcagaaaatataacgacttgccgcagcagattgaaccaagcgagaaccgaagttaccttgtccatctaatagaggatagttgttattccatgtgtttgccatcaatgcaccagcatcttgggcagacgtttcaccatgatgatatcctaaatcagctacaccaccggcgacagacgcaagcttatggaatttttctttattaccacgagctaaatcaagagcccgagcaataacaaaccgctgtacaggtttaaacccatcaattaagttcggaatagcgcggttttctacagtgtaaatcgcatactcttttgcttcattatcaatgatagatttcaaatcgcgatgacgaagatttgacgctttagccaaatcatcgatagaacctgcttgctttaatagagtgtcaaaaatatccattgtacctaccagattagtgagccgatttgtactataacatcggaaatgaaaagcacaatataaatcattccgtagatcattccatagtacataactaatagaaaggcggcagcaatagctgccacaattaggagtttcttaatcatttgtaaactcctacaattttgcaaatgcgctcaaacataataaatgctgcagtgaacgcaatgcttccgattactttagtggtaggcacaaggccataccacatgaatgttcctgagcaaatcattagggccatcagaaacaagtaacccatcacaaagaagtttctcattagtatttctgcatagagaaaacaaagttatcattcagaatacgattcagttcagagtaggtctgcgcgtcgcttgaatgctgacgagtaaacgccagtgcaagttgacctttgccataaccggtggtgagcggtttcattttattagcaggaatccaaaacacgccgtatgttacacagtttgaacgaagggtacgacccaactgagaacgcccagaacggatatgagaaagaacactctcaaaccctgcttttgaacgttgtttagctacaaagaaacgagcagatgcaccaagataacctgcttttccatcgctaaacatcagaaaataaaatccttcgcgctcagtaatttcacgagatggagcacctgctacccagtcgccgttacgaatagaaccgatcagttctgcgccagcgttatcgagatcagcaaaagtcataatattacgcatgttaatttcctcagttaattaaagtttattctccgatgaggggccgaagcccctcttattaccaaaatactactaccgctgtcacgataccaacccaaaacacaagaagacctgaagccaacagacgatacacaatgtgtcgtttcatttttgaccttcccatacggtttctactaaggatttaaggccatcagtttgaataatatcaatcgcattaatggcaaaataaattccgaatccgaacacggtgacaattccaagcgctaccgcaacgataaaggacagaacaacagttctcattaagttaaagcgacgatcaaaactactacgaatcattatattttcctcagatgaaagcattaatccaaacgttaactaaatcccatgcgaaaacaccaatgaaagtaacgataaggcagaatactacaaaggtgttcttcaaaatcgtaagtaactttttcattttgttctccagtttagctaacaggattatagtatcaccgaagaacaagaaagtaaaccattaaatgcacaagttacgaattttttcttctaaagctttaactttatctatgtgctcatcgcgagctgcagcggctccattgggatacaatccgccgtaagttgaatcgccattatcgcaagcaatgatagtataatgccaattcatagattcgagaatcctatattctttcaaaagttcagctttaatagaagcatttccgcgtttagctcgaagtgattttagctctaagtaactcatgttttactcccgttcagtttgtaaggccatagtatcatggccaatcccggaagtaaacaactttttaaaatttgtgcatgatgtacccgccagctccaactcgtgaaggttttactacttccatgaggtgttcgataccgccggcaaacattggtgtgtaccgtatgacattctggggcacttcttctgcaacgaatataattatacagtctgcgactctatgtttaaacatgggccctagatttattccacttccattagggaatagaccgtctttaccagtcgtaacattaatccatggcttatgatttgctcggtcatgaacaaagtgtgttttaacttcaactctaacaccttggtagtgtggatgagctaatacgtcccaggcccattcgtatggatcgttgttattatggtcaacaacttgatcgttcacgtatccatcgagaaaatctgctaccacatactctgccggtatagcaattctgcatcgtttaagaacgtcaattctatcttgagatggatcgatatctaagctatatctggcagtatcaatgatttttacttttgcttcaccccttagcttattcaaatctagggtaaatgtccggagttggttcaatctctgcagggctttgttcatcaatgccataaattcctctgatatgtaattcaccaaaataaacacgatcgtcgtggttacatgtgtctggttccacaacaaaatcatcaccaagttctacgagttcatcacagtgcaaccaagcatagtgaacatcaccttcatgtttaaccacatgatggcaaaacaccgtagccgcatgatgagtaccacgaagattaacaactttagaatgagatacgttaaatggattaatcatgtttcacccataataaaagaggagcccggaggctccttataattagcgaagttctgaaccccaacgatcagttacatcttctaatactacgtaaccacatgtacgcattttagcgtcgttgtaatcaaccgggatagatactacatcacgcggatgaactttaactgaaacaatacggtcagaaccactaccgaagtgaccgatgtaagatttagagcagacatgcagacctgtggaacaagtacgctgatcgtcttcatctacctgattacgcggcattgtaacagttttaccaggagagttatcaaacgtgtttgaagcacagtccatataagtggaacgaactactttccaaccaatgaagtgaccatcatcagtgatgtcgatatcgtttgcattcaggaaatcaaacagacgataaactgcacgacgagacgggttcagcatcaggttttccaggaaaggcagataacgtttaaagtcttcgccatcttccatagctcgaacgatacgctcagtcagaccagatttcagctcgatatctttatagaacaaagtgccatcttcaattcggacgttaccctgaacgaatttcttgatgccttgttccaggttaatgtggtcaatagcaccagcgatatcaccatctacaagtttctgcagcgcagatttaaacccaggatgttggctatcagcgttataagtagtacggccttcagtaattgaaatgaatttggaacttgctgcccatttaaattcacgctcaactggagcttctactttagcaggaacagctgccgcggcagctcgagcttcacgctctttaaacacacgccgaatagtgtcacgggaaacaccataattctcggcgagctctttcttagtgtacagaccgtttttgaagtttttaacgattgcatctttttggatttcagacagacaggtaacagccatttattcacctttattttcagaattttgagtagaagctccgtcaaggagctccatgatttttacaatatcatcgacgagtttgctgtcagtccgccaagtatccaagacacttgcgatgacaggataatcatctttaaactgttcaatctttttatagaagattgtctcagcatcaccagacagtttattataaattttattacataaagctaaatcatcgttttcatctttaattttacttgtacgacaaaccttagcgattttgtttaattttgtcaggaacggatttttcattccagacgcagtaaacttactcgacaagaaattcaatttatcgtaatgcgcaatatttccacagatacgatttccagtagcatttgatggcatgtactggtcataatctaccttatcaatacacttgatgtattggtcaataataaaccggtcaaatgaaagcaatccatcagcttttgccgcggctttcatagcacccggacgaattgcatagaatttcttaattccacacgcttctgccagagaccgcatgctcgcgatattcatattccaccaccaaacattatctgggaaagtgtggatttcatcacgattgcgaccgattgcataaccttcaagctcagcaatttcagatgatactaaagtctgacggtcttcttcccaatacccgtctttatcaatccaatgcagagaaacattaggagatttcggacgtttctcttttggaccagtatcataatcaggaagagcttttctctgggcttcaagttcagacacacggaatactacaacttcatcagtatccatgattttcttcagctcatcaatgacatgcaattcatcttcattgtctttgattacggtaatgtgtgcccagattggaactaacccagatttacacagagcacgaaccgtagcaatacgcttacccgctttatcgtcaataagaacgaacgctttagttctatcaaccccacaaatatcagaaatgtttacttggttatgacgatgccaagaactacttgacactttacgacgagcaggttcatcgcatgaaacataaactgatacttcgttatctacataatatgaacgaattttatcaagattatacttcgcaactacttgtttaatatcgcggttcccaatggtaataccgcggctctgaagaatagaacgttccttagaactcagcttattgaactcacgcaggaattcacggtcagattcatacgcttcaaacgctttaatatctgcggtaattacatcttcttcaagagcattcacacgcttctggatattagcaattgtttcttcgtcaagagaaagctcttcacgagatggagtaatgtctaattcgccaagagggaaatgaacataaaccttgccataacgattaagcagccaatctgccttaacatctacaccgctaatcggatatacgatttttccataaactgcatacagaccataactttcgtaagagctattaacgctgaaccagtcggtcttatctaccgggaaatattcaatttcacggcgaagagaatctacctttggaggtacagcaccaaaggtacgcaaaatatatgcgatttcataatgccaagtatcaatatcttctactttaaccggaactgtaatttcaagaccagtttcttcgtcttctttcatatcatcgacaaacatcggacgaatagtaggttcacctcggtttttcatgacagtataacctgtagctttaccatcatgataagacactacgttaaatgtactcgtatagcttaatggtgatttagaaccaagaccaagagcaccgatgaaatcattactattattctttgtggattcaaagaacgttttgtacatcgtcatcatgtcattatgattaagacctggaccataatcacgaattacaaatcgtgggtcaagacgagttggtgctttgatgtaaaatggacgattttcattaccattcagtttatgagcatcatcgcagttagtagaaagttcacgaacaacggcacggactttatacttataaagtttatttgacaaaatgtcaaaagctttacctgaagctttaatagtaaacgttgaatcgtcagcgtcagaagaaccaataattacttcatcatcacatttaattttcattttattcctatcaattgtgtcgtttaatgatttctgctacttcaagtaactcttcagcagtagcggtgttagttgtaaaaattttattatggatttctttgaagcgttctttgaattcctcagctgcttggatgtcaaagaaccgctggatgatacgatattcacgatatatagcatcgttgaataattcttctgatgggatgtaactacgtttcataatattttcctcagtgatttagggaaattatatcactataactttaagcaagaatcctagaatcatctccaagcacttcttgattaaagccatataaatccattcttataaagaaaaagggacccggaggtcccttagattaccacaccctactaactcgaccataaacctcatgtttagaaccatcaatgttttccacccagatagtaacccaggttccgggcagaggtttcttttcagcgaacagatatccatagtcgcctgagatcaaagtaatccaataacgttgcatgttaattccttctaagtaagggcaatagtacccttactatttattctttattcactcatccatgtcttacgtggtgcagcatcattacccataattaattcaaacagttctttccagttttcaggaagagtgactacatcataaaccgggtcttgaataacacgttcgtattcatcttcttcaagagagccaagacctttaatataacgaagtttccaacctttgaaatcatctttatggtcttcatattcaccaagagaatagaaccaacgttgttctttacctttggtgagaataataaccggagttttcacaaagcggattcgaccttgttcaaataattctggccaattactaaagaacgccaaaagacttgggaaaattgaaccaacaccatcaacgtctgcatcagtcatgatggcaatatttcgatagttagtattttcagcgggttcaccgatagtcaaaccagtgattgcacaaatgtcaaatacttccttgttcttcatagcatctgcagcagacattccccatgtattcatgaacttaccgcgtaaaggatatccaccatgaagttcacggtcgcgagttgtgagtagataaccgatcgcagaatcaccctcagtcaagaataaagtggtgtcagcatctttgccatatttgttggctttgatgtgcttagctactttggctttctgtgcctttttagcagctttagtttcagcagctttctctgcagcaagtttacgagctaacatcgcctcaataatcggcatatgaatatcttctgatttcataatagcgttagcaagcttcttgtaatcaatatcaatatgactacgaatttcgccccaaggagaagtcagacgctctttagtctgagaatcaaatcgcatgttagacatatcacgaataaacatgatgacagttaggcattctttaattcgtgctttattaacttctaacttgtacttacgttttaatgctggaatgagttcattgctcagttcatcgagaactaggtcaacgtgcgtgccaccgtttttggtgtgaatgttattaacatatgaaagttggcggaacccatcatctgagcggccaatagcaatagcacatgtatcagaatcctgcactacagcgttttcatcatacatgtgggcataagctttaaacttgccctgaactcgtttacccatgaatttaaattcaatgtcaggataaactacagctaatgtcatcagacgatcgtgaatgattgattggtcaatgtcagtcaatcctgtgctttcaaagtgactgaaatctggaatgaatgatactacagtaccagtcttatctttgatgaattctttatcttttgctgggtgttcttcccaggagatattttctgagccgttagaacaacgaacgatgatttcatttttaccatcgcatgttgcaccagtaaaagatactgaaaagatgttggttaacgcagaaccgacaccgttcataccaccagttttacgctcagcatcatcgccaaagttaccacccgcacgaggacgagtccatgcagctactggtcctggaatagtttctccttcaggtgttactacaggagcctgcggaagaccacgaccattatctgttacaataattttgttgcctttaatgtcaactgaaatcttgttcgcatgtttgaaattagtacgaatagcttcatcaacagagttatcaatgatttcatcaatcagtttgataataccaggaacatactttactgattggaatttaccaaaaagaaaacggtcatgcgcttcaaacgcagaactaccaatgtacattccgctacgcttaatgatatgttctcggtcactcagaattttaatttcgttcttaatcattacatttcctcggttagtgaaggaattatatcaactattaattatagcaagtaattcttctttgatatacatcaatttaccaagaacctcatggcctcctttaaccgctttatactctgggtatcgtggccgttgtcgttcaaacatagtccattgagcatcactaacgttagcgtatgcatatcgagaatttccgtagtactgttcaatccggtactcgttattttcattaagtgaaatccattcttcacagacttcataatatttctgcatccaaatagtacggccattcacgtcattgattggccaccaagcaaacctatattttccaatagcccgctctaccatttttaactgtcgtttagcacgcctttgcgcagttgtcattccaataatcataatattctcctctggccaacaagactataataccaaaacacgatgtccatgtaaacaactaaatgacccgaaggtcatttattcataacgaattgtgctgttcttaagaaaaagccctgagcacactgttccgttaacaggttttcctgttggtccaatagccgtaaagcctgtgtgctgaaaatcatcctctgagcaagaaaagaacttatatccagtgattttgatatcagtaaatcccgcgttatctaacacgcgagttgcgttatcagcgtcagtgcatccaatcatcatgaaggcaagcgctgtaattaaaatctttttcattttaatttaaccctataagttatattacctactttaataacccggatttctccgggtttcatggtaatgcgtgctttagttcccatcaataatcaccactctttaatccatcgtagtgaactgccggagcagaaaccacccgcttcatttgaccttcacacttagggttaaagcagttaacagtatagtcacgatgggaaattttacgcataatttctatcttttttccacagacttcacacttgtaatcatacattggcattaacagcatccttccatttttgtgttttgactacgatttgctcattcagcgcacgagtaaccatcatggagatttcatcatctgatacatgcgcatcatctttatgacgatttctgaaatgaagccaaagtgcatctactacacagttaataacatctgcgcactcgccttcaaactcttctttctgccgccatggacgattaatccaatcacacatttctccagtttctgaagaaagttgcaacatgacattcccaatgctacggttaggaataggataagacagttttgatgcttcaaaaataggagctaaatttaacattgatatgcactctgcagtgctgcaatagcagcgattgcttgaccacggttatgaatagaaagattcataaccaaatcggttggaattacattcgcggaagttccaacttcagtaaagtatttgaattcgctatcaaaaattacaaggtcttcaccgccgacttcatcacattctgtgccattagcccacataattccggatactctattattttggtagtcaactttagtaacagtaaaactcccgccattttcatagagttcaaacacaaagtcttcattaacctcataacgtgaagaaaattcttcttccgcttcatcattgacgaatttgtactgtacgccttctttaaaattcattacacaatctccatgtattctgggccatcaactgtgattacacgagcaaaggtacgaactgggacaatatcgccatggttcgcgaatacatacaaccaggtccaatgctcttctttaccgaaggttttctctttctgaacgacaattaagtcaggattgaacagaatgtcttcaaaagcttcggcagtaatttttacggtattttcagttttcatgttattctcctcagtagttgataagataatagtaccacatccttgtggtaaagtaaacaactttttatactaaaccttgacgttgcgattctgtcggctctacatcagctttaggcagaactgcatagtttccttgaaacactacatttactaaggttttaccgtcttcttcccactcatcagtgacaagaacatttttatgcagcgacagattagtggctgaattagtagaactcaccgattgggtaataacattgtcaagtgaattcacatgtacccacttgcgcagatagctttcactagattcaacgaattttttcaagcaatggatgtaatcaccaaaatcttcacggtaaatcttatacccagatttaccgtcattacgattaactactttaacgattacaccattgtgaccaacccacttaccaccaattactttaacattttcgcctacaactaaatctttcatcgtgtttctctcagtttgttaatgtagagccattatataacggctctttcataaagtaaatagctatcgatgagaaatttcacacccaacatctacgccgaacatataccctgcatcccagcctttagccatcaaagccttggcaaccagaaccatcgttggagagatttccgggaggatttcccggttgaaccactcttcgaagttttcgtcgaattcaaactcttccattaaccacgccccttaggtaaactcagtggatcggtatcttctggacttggtgcttcgcttaggcctagagcataacgttgagcatatttaagcattaaaatatccttagcgcagtcatggatactatcatgcgcgataaacccgtcgagcgtaccctttggaagaggggtagttgtcagcccgcgggtaagaagcagtgattcaattgcagtacgaatatcacgctgattccagaacttacacggctcttctttaaatgtatcaatttcttcttcggaaattccttgggctcgttgaacatcgcgaagacaatcaacaaaaatcggaaagtcaaagctctgcccacgacaccagccaaaggaatcccatggatgaattccattatcaatcagatattgctgggcttctttaattccagcaattactgataaatcgtctggcgttgaggccaggttagcacgggcctcagctgattgtttcttccaccactcaagagtagacttaccaaacaaccgatgacctttctgggatttaaggtcaaacttaatacgatgaccacgtttaaccaattcatcgaagctttccaaaacttctgggtcagaatcaaaggttattagagcaaggtcaatcacagaagagcttgacacatttccgaatgtttcaaaatcaataataaagtctttagccattttgagcctctagcataaatttaatttcgcgtaactggcaaccaatatattcgctcagatacacctttgggtcatatcctgtgaaccaagtaatagcattagcattatctgctatatcacgaagctcattcagaactgtatcaattttaatgttaatagcacgcttaacattatccggtgcttcaaacttagattcttgtaagccaacaatcattgtttgaaggtcttctaatttcaattcaaacatattacctcacacataaaacacatcatatcgaccacgggtagtaccaacatataataactgctgtgcgagagaagcatctgccatgtgaatgcatggagtataaatgaagcttctgtcaattgagatgccctgggccttatggaaagtcgaagccggtaatgctttcactttatgaaacttacgcttagcgtcccagaactcagaccaaggagctttacctcctttattccaattcttatatgtatctgcagtttttgccaagaagaattgaaatttattcatttcttcttcggatgagatgacacagattttctctctagcgtactcttcatcgtcgccataggtttcaatatctaatacccaatgacgaaccagatattcacctggaacacctctggcacccaaaaatgtggtggtttcaactgcatccaatatgcgaacaaactgaccattattgaaaagaatttcgctgaatttcttcccttcaaatttaagttccttggtaagaggttcttgcataacaacaatctcacctactacgaatggtcgttcagtttcatagattctgcgtctgattatttcattcaatttatccacagatttattagtgaatgcaagcattctgttttcaaataaatcttctggggttttaactaaattaaaataatttagcataaaatctttaagggcggttcctttcgtaaacccacggacaccatgaccatcaactacacagtcgcgaatccatccgccatttctgatttcagtagcgacttcaatgattggggcattactccgcatcacctcggtcaaatgaagttgtaagaaatctttatgagtgaagaatggactcagtgcaggttcattacttccaggttctaccggacgtatctgagccttatcaccaatggcaatgacaatacaccaggcaggaatagttgccatcaaaatcttaaacagcttacggtcatacattgaagcttcatcacagataagaactcgaatagatgccatatccggaactttcttttgttcaaacagaacgttttcttcatatgtcgtcgggttaattttcagaagactatgaatagtactggcctgcattccgctgagcttagataaaacctttttggccccatgcgtaggtgctgccaacgcaatgccagagataccctgagaaatcaaagcgtcaatgataaatttagttaaagttgttttacctgtaccggcaggtccattaatcgtaatatgttgacctttggctccttgtttgaccatttcaatgactttattaaaaatcgctttttgactttcttttaattggtcaaacgtaatcatgccacttttaccctcactacatgtagatttttaatttttgctttgagtttttcgcgctcaacatcgctaagtggttcatacactagctcagttgttttccaccaaagcattcctttggttttgctttttccagtaaaattcccttttgctaatttgtctgttaaaaccgacattgtacgaatccgtgctttattagccgattcttcattagtgaagaccacacatcgttctccatcgtacatatcagttgtgactggatggtcaaatccgtctttatccttatacgctactacatatccatagtgttgcattacattttacctctcaaaagttggaagaaggacgcagtcaatggaagaccttttttcaattttaacttatctagcattgagcatttttctaaccgacgaagtgagctaacaattagccgtattgattgtacacggatttcagcatctgatggacgattcggaactgatgctaaaatagcagataacttacgctcaactttagctaattcagacttaccaccgctgatacgagttctcaatgcattaataagttctaaatctgccgaggttgcagttccattcttttctttttgcacaaattgagaaagatgattttcgcgattacgtaagttagttttaattgatgttatagttttttcatactcacgaatcttttccaaacgagaagcttctttatcacttgttggcttaacagaatcagaagagcgaactatgcgtgccgcaatttcattcgcttttcgttcaaggccttcaatcgtattatttccacgcaaagtattatacttttgcttgacaggaataacattccctactacatatcccaagtcattattccaacgctcgagcgtcatgctatcaggatgatttcctttaacagttccaaacttttcgcctgagtatgcgcaatgtgtctgctgcatgatgttaaacagatattctggggtgagattgaactccttgtgccgacgttgagcagaacctaaagttgtaattaaacgagtataaactttagcggtttcagcagtaaatttcatcatgttttcctcaaaaatgctttcgtcttacggacggtataatgggtctaggtccctagttctagataatcactagttgactaagctatagtaacactaaagtagtccataagtaaaccagatttttcaactttgttatgacccaccactttgaacttagttcccatcggtagcatcctttcttgttctttatcaatcatctcgatgtcagcgcttctgcgctgagcaatgttatcaatcacgtcatttggacgcatgaattcagaatccggagcagtaattaaaagtgatttcatgttggtatgataatcaaatgattgatggcaattattgacttcaatgactacgaaggtcgagtaatgccatttgcctgcaaattctcgggcaatcgtttcatctgttgtgaatgatgctacctttccaaagtcaaatttctctcctttaataagagcgtcataaaaggctttagcctcacggcatgatagacctctatagagagtgtctctgttatcaatttgatggcgtctaacgatagagtcaagtttcttatgaaattcttcgccaatcttattgttcatgcactgccacagaattgactgttctttgcagtcaaaacgattggctaatgcttcccatacgcttaaatcatataaaggtaatcctttgctttctcgcgcgaagttaagaacatcaatggaacgaatgggttcttcgataggaataacctttgataattttactgaaatagatgggtttaatgaaatagccatgatattctccattttggttacgagaggtatcatatcatggctttttagaagagtaaactactttgtgaaattattttgcccacggagaccagggcggcgggtcagaccagattgaagctagttcgtctagaagagcttctggggctttaataccatacttctgtataattatacggtattcgtctttgatgtccttagaaatcactggatgaacttgaacctcttcctgaggctcttccatcatttcaaacaaatccatcacatgaaccactcagtattgcgatacagacaactactgctgttatatccatcagctgctttttgtaacagcgggcttggagcaagtttgataaaatctgcacccatatataaccaaactaacttagtaaattctattagagaatctgtgctatcaatgataatctttttgcctcttgaaattatgtcattttcgtattcatataagctagtttcatgacatacattggtatatcctttcaaatggagagcatgcagtatagaaacaggacttcctggaactgtatctacgtcaaagacatgagcagtcttaataatgccataatcttcagaaggacaccaaccaaacgcctcgaatttattaattaagtctttgaaatctttgtcgaacgtactgtatagagcaacagtaaaaattctatcttggtctagacgcaaagctccttttgcgtcatttcttgattgaactgcgcgttgtaagcttactttatagatttttgcgtttgccacacatagctccttcagtcatgttgttgtcttcaaaccacttatcatttgctttaattaaagcaggcgcagcttttagtaataacgctgcagctcttacacctctgtaccaacaatcaaaatgagacttctttaatggcgattgataccagggcttagtataacatatcattttcttctcctcagttagtaggaataatataccattcccagtatagcataaaaggactcccggaggagtccttaattttatacttctgcactagcttcaaacattttcgcgttggtggttgcccaagtagcagcatcatcaactactgttgaataagcagctttttcggatgggaaaatctgatactgcgcattagcaatacgatgtgaatcagaatacaccttaaaagctacagatacttctgtacctttaacttcaccatcagcagttgtatggtcaaaagttttgatgtttacgtaagccattttaatctcctatttagtttacaggagtatttatatagctgctgtaagtgcctttaatatttctttatcaatttctcgagtgatttcttctcgaagggccaatactaaggccctttcttttcgttttctgataatttttaaacgacgcttagatattcttttagccatcagtaaccactgtcttgacgagcaaagttctcagcgtttttcagataatacagtttaaagatttcttcagaatccagaccaagcgccataaacatattcagaacaaagtgcaggatatcaatcatttcaaatttgatttcaagctggtctttgtcagacaggtctttgatataagtttcctgcatcttgacgtggtcagctttccatggtttccacacagcgctagctgccttttcaccattactcataccgccaagagacgtcagcagttcgcggaattcgtcatcaatgtagtctttttgattacgcaaccactgcacgatatcaccagcttgagccaattcatcaggatgcatgttagtaccaggcttgtcatttgcaagacgaacctgaagagatttttgcatatcaagcattacttgcagagggtcaccaccaaccttacggacgatacctgcgtatcgagcttcagctttatctgcaccagcgatcagttgactacattcgttaaagtgtgccattattttattcctttcaattaaattagataaatattatatcacttaacataaatagcaggaggattcatgtctgaagtgaaacaagaatgtaaagacaagggaggatttggaagatatctttacgtcggaatcgccactgctgctttagctgcatggaattatatggtagttccattagctagcgcacacgggctagttcttcctccaatgccgttagaaaaggttgtgtcgtttattatgactggaggattgctttaatttaaggggctttggcccctatatcttcgcatatttgtcaagacgcaatttagccattaaaccttgcgatatattttgattaatataatccgttatttcagaagcagttgccccctctttcataatcatatcatttatatctttgcttttccacggcgacttatcccagaaaactaccttttcgccagcatctactaaacgtttcatacgcttaattgtatcaggatgacgaggttcatggtccataatccatgctcggttgtcatgacatggaacttgagctaaatctaaagacccaccagttattgcaatagcattatcaatgaacagcgaatctattggtccttccatgacgaatacgagttttgactcatcaatagtgtcgagaccataaattttggtcgcgtgttcatgggctttgattgtgatgtatttttgtggagcattctttcgtagtgctcgtccttgaaacgactcaatctctcctttcttgttgaagataggaataaccaaacgtggttcgttcgtctcattcttataggttcctggattaacggagttaacaagagaaggccattggttagtaaaccataaccttttccaagaagtgcttggaatacatctggcagtcacgtatttaactatcggatgttccttgggaagtctatctaatcgctcacaaaaattaagtttttctattacggggagttttgcattaattttctcagacggttctacagtctttggcttatcaaagacttgctcctttcttttctcaagaagatactctcgatagaggtcgggctcattatctttaagatattgtgatagccacttgttatactcacagttgaagcaatgacaacgtaatccttggcctgcgtcaaaaatccagaatcgggctttattgatatctttctgtgagtcaccacaaattgggcaacggcagtttaatttgaatgttgaagatgtagtaacgtgtctaaatttaggtaagtgtgatattgcacgaattgcaaactcgttgtcaacccaagacataatatttcctctggccttaaactaataaggccattttatcactttttcttggcagcatctttatctgctttccgtttctttggaagggtttcgggtcctttattgacaatgtccccggaagtggtacctgatgcaatattctgtggattgccgcccgcatcacctgcgaccatctcagtaacaaactctttgtatgttttcatagagcctcctactatttattcatgcgtaatacgtaagcatttatatgtaggatacagcgtcggagacattgattttggattgtctttgataagcataaactgcttgcctgtatcttcacacttttgcttaatcacggcttcatctttaccagtgaatgccatcttttcagtagacattccacctgaaccagtagatagcgccattattaaaacgtacgtaatcatcctaaaatccacttaacgatgttgaagttatcaaactgagcatcacagtaaagaacataattcaacttaagtgctgcgccgtcgtctttaagttctgcttgcacttctgtctgtttgctcgggtctacgttttcaacaatatgaccaacatctgcacgaatctgctgagctacttcagattcatcagcggtcattgaccattcgcacaggtctttatcatagttggccatagcaggaactgcagagcaacttgatactgcgaacactaaagcaagtacaatctttttcatcttgttttcctcttctcaatttgtttcagtaaggccatagtatcatggcctttggaaaaagtaaactaccttttgaacaattttttcaacaaagtgtcagaagtcagattcttagtaggtagatatgttgccgagttaacccagatgccatcgctgttatacaccttgacctctccatagtcgcatacagataggtctgctttgttatatgcctcaatgcctcgatgaatggtatctgtggctgttacaacaaaagagtgacctgattggtcacggaccgcgctaaacacaaaaatcataaaatttacctagaattttaactcttctgccagagcatcaagcttagaacgtgatactcgttcctgacgattagattcggctacacggttctgtgcaccggcaccttctcggacggtattgcttggattaggcttagttgggtcgttttgctgctcaatttctacccagcgttgattagccttatgcacacccataaagaacttattgttgatgttcttatcaccgtaacgtgatttaatttgcttaattaactgttgcttcatctgagcaagttcaggggtttcaatcacagccagcataaagtctgccgtagcaggtagaccagcagattctgcaatatcactcatgtccatatcagaagcatcccacgctgaacgacctacctgagctgcggtccaaagaacagtttcagattctacagccaatgcacgaagttcttctgcaatagctttaactaacgtgtaactgttttcagtatattgacgaatacggcaagaagcacaaataccaagatagtcaatgatgataacagtcggtttaaagttcttcttgagtttcaactcattcagaagagctcggaatgtattagcgttagcgccaccagtcggatactgtttaatgattaaacgaccaagagtactagaactacgccatttttccatcttgcctttatattcagcatatgatacacatccatcatcgatatcatccagtgatacatcaagcaagttagcatcaatacgtttagcacaaacttcttcagccatttccatggaaatataaaggacgttatgccccatctgaagatagtctgcagccaatgaacacaatcctaacgatttaccaacgttgacgccagccatcaatacgttcagtgtaccagtctcggcaccgcctttagtaattttgttcagaatgccaagtttaaacggaactttacgagctttattctggtatgataaccaacgagcttcgtaatcttccatccaatcatgaccaatataactatcaaacgatactgataaagcttcacgcatgatatcaggaatagctcccatatcaggaagacgcttatctcgcttatttggctcaagctgggcattagcctgaatttcaataattcgagacgttgcgttatacatagccttttcttgaacgtacttctctgtttccttaactaaccaattcaaatcttcaggagcatcagataacttatcaataagtttctttgcaccttcatgttccgtttcagttatagacgaattatccagtgctacacataacgcagtctttgaaggaattgctgtgtattcattaacgtgcttcttaattatgttaaacaccgtctgagcaggtccttgctcgaagtactctttgtccatatatggccaaaccttcgtaaagaaagcctggttgtaaatcagattagctaagattgtttctaccactttaacctcttaaaagattttccataatgattttttcttggtctttaatgcactctggatttgttgtttaacacaagcttccacatgaggataaagttcatccttatgagcttcagatggagtactaaactcaatagttacttcccccgaaggagaaatatttaatttatgaacataaaccaagtgtgattgaccatttaattttatcacaatttcttggataacagtcttcatagcttcttggattatttcatggcttttcttgaacactcgttcttgacgctcgaagtctccctcttccgagggagaatcttgttcaaatttctcgagttcagattctaaatcaaactcagtcttcattcatgaagttctctaattcatcttcaacttcagcagctgatactgaaccactctcaggaagtttaacaccatcaaccttagttgaaacttttgagttaatcatttctgctaccgcttcatcaaccgcagcgtttgaatcaatagcacccaactgataacgggctttgatagcgtcacggaatggctcatgcttaaacagaggaccccaaaattccgtactgctcgtatcttttgcccgccaggatttttcttcacgaatcatctcaccggtttcaacatccaggaattctcgtgcataccatccgtttttcggtttaaccacaaacccgatatccagagccatatcaagcagaccactgtacggatcgataccaccatcgaatttaacatcgatgaagaacttacttttctctttgacagtacgtgatttctcagcgttcaggacaaactgatatccctcaagctcagtaccgtctttaatttggcgtttaccgatgatgaacacagtatccgcagaatacataggacctgtaccaccagtcattaccgtcttactgaacatctcgatggtctcgattgtatggttaaccgcaacgcaaggaatgttcttaatagagaagtaaggagttacgatacggaagagagacttcagacttttcgcacgagtcatatctgcgacagatttctcgttcagagcatcttcggtttcctttttagacgccatgttaccaatagagtcgataaacacgatgactttttcaccacgctcaatagcttcaagctggttaaccatatcgatttttaattgttcaaccgactgaaccggtgtatgaattacacggtcagggtcaacacccatagatttcagataagctggagtgataccaaattctgaatcatagaacaaacagactgcatcaggatacttattaagataagcactaaccattgtcagagacatgttagatttgaagtgtttagatggacctgcgaagatagtcaacccggactgcataccaccatccaacgctccactgattgcgatattaagcatcggaattttagttctaactacatctttctcgttaaagaattttgatttagtcagttctgctgtcattttagaagtggatgctttaatcaggcgagattttaagtcagacattcattatattccataagtctccattatatttttctcacaggttaaaggatagagtaattatattactttgttcttgaagctattaacagaagttccatttcttcttggtgttataaaccactgtttccatatctatttcatagtgtattttacatccaacgcacatgccatgccaccagcaatgcattccatctgagccagtagttccttcatgaacaaactcatcagatttacatacgaagcatctgaattcttcagccttgaatatgttaccagctacatcagatttattatagatgttcataagaggtccttggagggctttcgccctcacagatatggttctaccttaccaaactcatggaaggcctgagatttcactcgagtgttaatacacatacgaattgatttcagaggttcgttatcaccgaataacccacgtctttcgccgtctttagatttccaacgggcttgatttgggaaagcagcatgtagttgttcaagggctctattctgacgagcagtatcacgctgagtagagcaaccgccaggagactgcaccttaccagatttaacgagatacttaaacagagccagatgaggatgacccatgttaattaattttagaaaagcataagcatcttcgttaaggtcaataattccgtaaccaatatcttctgctgtaagtttagtcaaatcatagaaagtattggtgaacccaaaactattctcgcgataatgaccccagcttgatgtaattttgaaaatcggcaagcgagcatgaccatgataataaccacaatccatagcagtctctacgtatttgaccatatcatcaaatacctcttggctcattgcctcgccgacaccaagtggaacacggcgatcgtcgcgctcgcggatttcagtcagatgaatggtagtatcgtcatcaagcatccaaattcgttgtcctgcatacatttcagtaatcagacgacgagttcctgcaattccatcaacatcatcggggacagtaacgattttagcagcatgaccgtgccaagtttcgtatgcttctttttctgattcacgtactacaagatgtggaacataaccttcaggaaacatagtcagggcagtaactgccccggcgcgcttataacttggaattacaaactgaatcatttccattcacctttataatctttctttgcaatatgagtttcaccagtataagcatagttatctacaagatagaaatgacgctcatacacgtgcaaagacccgacgttccaaataatgtcgccaactgaataatttttacctgatgcattcagaagtttggttaactgttccagaacatagagctgccacgcatagtcattacgatatccaaagacgacatcgttagagcgcatgtttacaacagcatgaactttattatcacgaatcagatactgaacattgttagtacacatgaaatcactcatgccatcgcgctcaaaatcatactgcatttgaggtcgtgtataaatcataattccgcggcgagaatcaggattgctgataagttcttttgcacagttagcaaactgtgaatagttttgtgatgaccaaactgcccagccatagttagaattaatctcaccatgtttggatgcaattgctttccaaatagctggggtttcacctggaatatctttaacgaataaactttgagatttataccactcaagttcccgagcaatatatccatcattaactgcgccaaaaattaggttttcatctgcaataaatgatgcacctacgatttcaatagtcttcacacccgtcttatcaatcacaaattctttgttgagcaaagcatcagcgaattcttgacggatatcttgtactgtcattggagttacaatcatgagacctcttatttaacttgctggataataattgtattctgctgtgcgttagaagcagaccaaatcagcgcaattaaccaaccgataatggaccaaccgaatactagatttgtgataaagattccaccccgtgatttatgcttacgactgcaagctacaaaggtcggcaaaaaatagatgaagaaaagaatgattaaaccaaatactgcttccatgttaatctcctcagttagacatgcatttgttgtagatgtgattttggagagattttaactgctccatacgttgtttatgctcattataactcaatccgccgttagcaaaatcagttaaacgaatctggtcattcactgctgccgcttgagcagtacatgtacgttctttttgagttttacgcagacgcttaatttcttccagttcatgcttattttgctcaatcatgtcgagttccatcgcagatagctggcgattaggattagctttttctttcgccaaacgacgctctaccgcgagcgattcagcagagacctggttgctagcacgatagtatcctacagtaccgccaattgctcgcacctgtccaacagaagaggccgggacgatatcaccttgtggcatttgacaaccagtcagcgtgagagcaacaataacagcaagtaacgatttcattgtaatctcctcagtatgttatttctagagctatagtaccacatccttgtggtaaagtaaacaactttttaaaaatcgaacatgtcaagaagagacgatttctcttcatagtctaaccctgccgcttcagacatacccgtcagaggtttaacgaacgatttttggaacagaacactgtggtcaagccacactagaacttcctgtcggatttcttgtggcagctcagtgcccgatggccatgccatacatttctcaccgtacgggttaccttcacgcagcgggatgaccatcaccttctcgccttccatgattggtgttataccttcaaagcccgcggtagctcggttatacgctaaagcacctttaacgtgatatggagtacctttatctggatatcctgcaccatcatcatacttgccgatgttgttggcggtcttaacttctgctattactttatagtcaagttcacgatactcagactcaaactgcttataatattgctgtaaagattcttcaccttcctgcagcatacgccgaatagattcttccaacgcattctgaacagcagttggtgtagaactttgctgagtttccatacccatgattttcagatgcggttctgcatatcgagtaccttccatatcatacacattcagagcatatcgtttcttcgctttccagaatccgccaatgccgtttgaccccaacggaggacaagaaatagcttcacggtccatgaacattaaatgttctttattgttcatgtattcacacatctcacgatatgattggtcaatccaaggttccattttcttcttgccgaattggttcaggaattcgaccaaatcgttagtttctttgaaacgctcaagacctaccttctcgataaccttatcaacacaaacgtaaattgagtcagtatcaccagctactacaaacgaatgtccttcagtaccacataccttgttgagatattcattaactttacgttcaatccattgaattgccatttgaccaaacaacgtgattgctgatgcgttacgcaaatcataataacggaagtaaatgttacccaatgcaccataaagtgagttgatcagaatcttacggtttaactgattagtattacccaagatttcagcatgtttacattcaaacatcagtttgtcaaggcactcttcggtatatgtcagcagttctgctttcatatcatcagagaaatcttcatagacattaacttctgcgaatttatcgatagttccaaacttcttatcattcagaacctttttaatcagttcttgatttcgtttggcacccatcattttatttttccactctttacgctgataaaataccttcgcgatttcaactggaatgacaccatctacatctttacgatacatccaaccatttggtgaacatgaatattcgtcagacggacgaggagcagtcttgttaatgtactcacccaatggatgaagtttaaactgtccaacgatagtttctggtgaaatattgacctgtcgaatgattgacggatacagagatgtcaagtcaaacgacatgatataacgatatgcagcaggaactggttccttaacatacgcaccaggatatgactgtttaacatgagaacgactttgtggaataaccttgtcctgttctttcagactgttaaagatgattgcgtcccatgttttaattggactcattacaccttggtatggcatcttcgcataataagacatcgagatagccaggtcaataaatccacgaacagcatcaatcgcttgtactgattcaacgtcgatgatgttatacgaaatataccgttggtggttagtttcacgtaatttattgattggaccgtcatatgctaatttacctttcttggtttcataataagcaatgaaatccaacttatacgtcggttggttcgtgaaactaaatttcttatacaaatccatgtaatcaagaatagtcacacccatgatagaataaatttctttatcaccatacatgtttgtgataattttagatgaaactttattcagaggagagaaccgtttcatcgcacgctcaccaagaatctgtttcacacgattcatgatgtacggaatatcaaatccttcaatgttccatccagtaaagattgctgggcatttctgttcccaaagattgatgtactcaagcatcatttctttttctgaattgaacggcatatatactacgcggtcaagaatatgttgtggaacttcatcaccgccttcggaatctaaacgagcagcgagtttcttgtcccactcggaaacagaaccataaagagaatgcagtaaatcaaatacgtagaacttatcatcaaccgaatcgtaatgagtgatagcatcaatttcatattctgctttcatcgggtctgggaattgagatgcagtaacctcaatgtcacagtttgcgattcggatgaattttttattataaacgatttctgaaccgtaagtatcactgatatacgcgagtttgaaatcatccatacccattgcttccattcccatatcttccatacgacgcatccaatcgcgtgcatctttcatagttgggaatgtattcttcttgcaatacttgccatagatgtctttgtactttgtttcttccatgcaatgactaaacataacaggagaatacggaacacgtcgcatgcgttcctcaccagtagaatcgatataacgttctacaatgtcattgcctagagattcaacgctaatataaaattctttcatgggtttcctttgtttatagaccgagttattagtctttaggtgagataattatactccaatttttataaagtaaaagggccgaagcccttttcttacgcaccgattgtgtacttagattttaaagtccattcatgcttctgtttgaatgtaattacccggaagttattctgcatctgggcaagagtttgaccacgattaatactcagtaaaccccagtcagcgagcagttgtgcgattgagtctcgacgaatttcatcttccaaatcaatagtaacaggacgaccatcaagcttcaacatttctttaaaatggacgatatagtaacgaccttgtttctgaagaatgtggcagctttgatatagtaccttatctttgttattagcaattcccatacgagtcagagtttctttaactttcaggaagtcttcaggctgtttcagtgtaatttcaatcatctttaccattccaatgctgttttcttaagagttttctgttctttcacgtttttcgtgattgtcttgaccaattcatcagtcacaagacctttcattttcttgagagcaggtttaagcttgtttttagcttccagggtctctctatacatcctagcatcaatcgcattgaccttgtaatatgtcattataacttgaagaatcaatgcatcctggatgttttctgttaacttagcccatttcccataccgacgacctctaggaacagaggccatcatatagttatagtgtgcttggtcagataacccttgaccaacaaggttcataacataaaccgcaggcatacagtcagcgtgctgagaaagagcgttttcaaccatgaattttgaataatccatcgtcgagatattcaaatgctcttgcttttcgttaatagacccaataattgtgaagaattgattttctgctttttctttatatgaatcagataattcctggactttcgtccagtctttacctaaccacgctatttggtgctcgttatactgatcatcatcttcaaataaactcatcatttccactgcatctctacaacaagttgaataagcatataaaccaagtgtaattcaatcgaagctgctatgccatgatactggttattttcaccaatgatttcatacattcggataatgcttgggccagtaaccattgtatacagctcagaagaaagtttatctacaaaccaagtatagtctgctgcatatttcggagcaagagcacggagttctttgatgttcttagttttaatagcttcgatgacatcttcaattgaaccacggtcattcagaacgatagacaagatacctgcatcaatcacacccttagaagaataatgatcaagcatgttaatagtcttacggaattctggaaaattctttttgaccaaagcagctacaactttcttatcttcaactaccacgccttcattttcacaaattgcgaggcaacgcttgagcatctcgatttgcattggcttaacatcagatggagatggtttaccaaaattaattacacggcaacgagactgaagaggtttaatgataccgtcaagattgtttgcagtaatgataatagtacagtttgtgctatacgcttccatgaatgaacgcagatgtcgttgagattctgcaagacctgcacggtcaaattcgtcaatcacgataattttctgcttgcctgcaatagaagcagaacttgcaaatgcagttaacggtccacgaacgaaatcaatcttacagtcagaaccattcacgaacatcatttcagcattaatgtcattacacaatgctttagctactgtagtcttaccagtaccaggagaagtgctatggagaattaaatgaggaatttttcctttagctactaaagctgaaaaaatttctttatcttcagcaggaagtacacattcagaaatagtacctggacgatatttctgttcccacatgaagtctgcttcgtttactgtcaatttcatttatatttcctcattcagattaaagatggggccgaagccccgaaattattactcaaaatcaaaggtactgtctgcttccattgctactacataagaggctgatgcaccttcaaattttgcggcagtctgtttcttggagccattcatttttgcccacagcatcagcttgtaatcaccaacagtcatcttcatattgctcatgttgatgataaagttaaagttaccttcgccatcataatcaccgagcgtcagagaatacttcggacgagtcagtgcagcatcttctactttgttatatccacgcagaacaattttaccatcaacattagtgatagcaattgtgtcaatctgcataccacgagacactcgcatcagctgttgcaggtcttcacctttaaaatcgataattacgtttgccaccgggaatgggattggtttagtcgggaacacgattgtgctcgggtcagctgctggccagaagatagttgagcgagcatctttaattgccagattaccatcttcctgcatgataatatctgcatcatcaccaaccagagacagaatgctcaggaaactgttcaggtcataaattgctacatcagtatcgatggtatcagaaattgttgcttcagcataagtcgtaccgttaacagcacgagtcatgataaaattaccaggtttcagcatgataccagagttgatggtggagaagtttttcagaatgttcagagtttctttagagaatttcatttcaataccttttaattaagttcaggataattatatcaagctgcgaatgtagcagttaattcttctgcaacaatctgacctgccgcaacgagttgctcatcagcatctacacaataatcattttctagacgttcgccaccgtgacgatcagtaacaattttggcaccagccttgattgattcattgtaatgcttacgcatcagttcaatccatttttctgcgacttcatcatcgatagatttatagaaagcaaagcgagcttcggaatctttaatcttatctttgatagcctgtttagtttcttcagttagagccagaacccaagacttacgaatacgattttggttattcgggttggaatctgcacgtacgtttttaacctggatatctttcacatcaacaaaattaatcattatatttaccttaatcgtaataatcttcaaccatccaaccggcattcctgttggacatgactctattatattcatttcctgtaaaagcatctcgtaacatttcttctgttactaagtgcttttcatcagaaaacaaattagttaacacatatcgctttacttcaggaaaggccagcagatgctggcccgtagtaaactcattcattccatcaccgtgaatcgtccgaccttcttcatttgaaggtgttggccatatgcctgcgggtcgtggtcacggtgagaaataataaacacattggcatctaccatcttattaagaatagcagttattgccttaacaccttctgcgtcggtggccgaatcgtagacttcatcaaggaacagacagtttattttaacaccagaaactttttcagcaatatcacgccatgtgaatagtaatgctatatcaattctggctttttcaccttgactaaacgaggcataactaaactcttctcgtccgcgagatttaatcgtttcagagaactcttcgttcaacgtgaacgaataatcagcttccataatttttaggtagctgttaatttgcttattgaacatcgggatgtacttcttgatgatagctcctttaataccggagtctttcagcatttcagttaaaataccacgacgatatttttccataaccaaattagttttgacgagaataattttatctaattcttcttgtagcagttcaatcttgtcagagttatcaatgaactcctgtgatgctttatcaattgctgctttaatacgacgtgctttatcaactgcagttaaagtcatctgtttcaaattactcatttgatttttgatgtctcttgcacgcgtacgaatagtattatactcgcgagctagttcatccagttcactctggcgcgtctttaactcgccaagaatggtattacattcttcaacatgatgattaatcttagtgattagagtgtcattagaatgcaaatcctgcaagcacgttgggcaatgaccgcctttatcatacaacccaagaacctttgagtatgattcaattttagaacgaatcttaaaggttttaccttgaacttcttgaattgactctgctgggtcatcaccaatcacgagttcaagcagttcgctttgaagagtttctaattctgctttatatcctcgtgcctctttcacctgctcatcatacatcgcctgcaggcgagctacgttatcaccagaaagtttcttctgcttttctgcatactcatgatgagttttaatttcattagtcaatgcttcacgctgaacatcattaacctggatttgctgattgatttctcttatctgtgtcttgttcagtttgtccatatcagccaaaagagacacttcaagcaaatcttcaacgagctttcgtctattagcagttgataaccccatgaacggagtatatcctgccgttcctaatacgacaatctgcttaaacgatgtgtatgacatgccgatgagactttcaaagtaggattgaaaatcctttgaacttgcggcttcatcaagcttattgccatctcgtaaaatctcaaagacattcggtttttgtccacgtttaatgtagaaactatgaccgtcatactccatccacagttctactacagagtccttcttattgaatgagttaattaattgacctttcttaatatcacggaatggtttaccaaataaggcaaaagtaatagcttcaagcatagtacttttgccaccaccattcttacctgtgattaaggtcttttggcatttatcaagttgaatgtcaatggccgattggccaactgacattatattcttatacttgacacgatttagtttaaaagtcttcactgattttgtgcctcaatgtataactgtttagacataacctttaaggctttgatatcatctgcggacaggtcttcaagtgcttggatatattcttccattaaatccaataagcttttaacttctacttcttcgccatcttcagactcaaccgagttgtcaactttagaaacagttcttaattcatgtactaccttttcaagttctgattcaaacttaggaaggtcttcatcgaccgcagtgataataatgcgtactgcgagattacgaaactcttcaaagtcaatttttccagtaacaggataaatcagttttctatgccaagtgatttcattagggacgaaatcaaaggttgataattcagtgtcttgaacccagaagccacgtgggtcgttctcgtcacccgctgtaagcgtccaaggcgttccgatgtacttaacgtttgctgcgcttgatatggtatggaagtgcccagaccatacttgtttgtactttttgaggaaatctggttccagcccatgagacttcattcctttataaaaataaaagccattaagctcccagtgaccaatacagtattcagcagacgattctttgatatgcttcatgatttctgacgtgttctcttcacacatccatggacacaagtcaatcaaagtcccatcaaaatccatagtcacgggcttttcaataacagtaatatgcttatacttaccaagaacttctgttgatgcattaggcgtcaacgtattcttgtagtgcatatcatgatttccgacgatcgtaattaagttaattccttctttctcaagagactccgcaatttcacgagcgaattccattgtcttatgagtgatagctttacgaacgtcaaaaatatcaccgtattgaatgatagttttaattccatgctttttggcataatcaatatgctgcttaattccgtgtcgttgtacatcctgtacccacgggtcatctgcgcggacacctaaatgccaatcgcctgagtgaataattttcatataacctctctagtagagtttaattttatattattccatgaatagcaaaaagggcccgaaggcccattacttattttgtcattaactcaaattgttctttaaagcaatgctcagaatcttggtgttctaccaggaattcaaatgctttatttcgctctttatcatagagcttctggtcagatgacagatgtttcattcgttcaaagacttcatttttattttcatcattcaaccacagaatgccagaatcatgagaagtcaacggctttccatcaacccggaatttcaaagcatcaccagtagctttatggaacacaggaatagttccacaagcgcctagttctaaatgcgtgtattccagcgaacgctcaaggaatttatctggaagacgtgacagctgataaccaaatccagactgagacatacgctcaagcatttcagagttaacatatcggtcaagaacttgaggattcagacctggtccagttttaacctgatgataatgacggcaataatcaatttcatagcgttctttgatgttaataaatgcaggactgcgttctaacccttccaagatagtcgttttgcctgcggggcgcagatgactttcatgaaagtcaaacatcaagaaatagcctttccacgtagtagtacgaccaatccaacgatgaatatcaaaatcaatagcagagaagtctttccaatacttatcacgaattgctttgatgttcatagcaggttgaaagttataaaccggaggagctgagtcagaatcatcaaagaaactcaacccgccgcttggaaaatattcttccattagcacggtattaaaatcgccgtttgagctatgactaaacagtacatcagcacgcttaacggtttcttcaagaccagcatttctacgaagtgacaatgctctatggtcatgttgatatacgactaccctaacttcaggtttaatgttctctatgagcttcttatagttatcaatcgctgcttctggagcattgatagcaggtactgagttaatgataagaatgtcacatgcgttaagcagagataaagtcttatcatagtcatctgcaagagacacaggaatagttacatctttatagctatgtgctctattacgagtaaacgctttatctttagcgtaaatgatatttacttcatggccatgttttactaaccactcacggtgctcgagactgaacttggttacgccgcatccctcaagtccgcgagccattaaaatattaatcttcatatattgacctttgttgttaattttggatattttaccattcccgtaataaagcaaaagggccgaagccctttaaattttcttgtatacaacataacccgctgcttcacatatacgcttagcttcttcaaagcgtctaagcatatctaccttggcattatgaattgcttcataatcgggagcaggtgcttctctcctagcggtatcacatttataacagaagtaactacgctttggtcctgtataacgttctgaacaattactgcaccggcacgtgtaatttccttccggccaatcatgtccaggattagaacccatcaaattcgtcatacatcccaattctcttcactagtaataaaatcagggtgttcatctaaatcaatgaatccccagttctcttcatttaccattcataccaccgtttaacttggaaggtgtcaacccagacaagagagttcttatctattagcttacatccttcggtagagcctaacacgcgatattgattatctgctacctttactgccatcgtaccagtcgcagtgtttaaagtaaatcctgcgtctttacgaacacgtttaaattttacttgtaccagcatttagaatgtcccaaacagatttacgagaggtattccaacaagtcagaataatctcatcattaaaaggttgttttaaaatagtacgcagtttttcaatagcatacttgtaagcagggaaattattgtctaataccgcgtctccagcatgagctcgtaatcgctcaagttcacgacggtttttacgaacaactttgttggctcgagcaatagcttgttcttctgccgcttccattagtttctgttgcagctcgtcgcgctcttcctgggtaatattgttcatgttattcctttggatggtaatttatttcaaatgtgaattcagtatcagtccaattataactgtgttcaattatagcagaatctgacctgaaatcagcgtcatgtggatttttcgggtcaatgtgaatatcaagatcaagcacctcccttaaatacatctttagcaaataagggatagcgtctaggtcttgcacatcttctaaaaacccgtcgaggttaatcttcagcctcatataaaaattccagattaggtccatcgcttgtaggttcgctctttttagcagaccctggcgccttataagcggtggattcatactgcgtcattttatcgtagatgtcctgaataaaggtttcatctgctaacgcaaccatatcatcgtcccgtgaatcatacacgttatggacaaaatagctgtatttctttgccatttctttgcgttcttttttgatacgctgaacgaatgcattgaaacaagcttgggttatatacgcatgcgggttatcatacttagtttcatcgaagttgattaagcctttaattgcggcttcaatcccgtctgaaatcatttcttgcttccaggattgggtgtatcctgaaaagttgaaacgcttactcagaccttccgcgatcagcataatagcaaggccgatcgtatcgttctgttttactactcgagggccgccagcagcttcagactcccgacacttctctttccatgaacagattgatttatacagttccttgttatttacataattactcatattgcctcttcgcttcaattaataatatctattataacaaatttgggaagcgagaggattaaagcattacttaatcaattcagcgcatgcaattaatttcatcatgatacgataaaaatcgttatatgtgaaatttagcggaacttcaataacggcttcaaaatcttcaaatacacgctccattccataaccagcgatatcatctgattctgcataccagtacgttccatcttgtgcaaaagttatttggctattttcaagacagaacacacctttaatattttcatgtgtaagagtcaattgaattttcatagttcacccttcataatacgatagcattggaacagctgttccatgatacgtttgaactcaaccaaactaagttcaaaccaatcagattcatctacttcatgcatcatttccatgaatgaagagtataaactttcataatgagtttcatttaacatagaggcatgcgtttcccaatacataccctcttcattgtcaaaccaaacacccatataagaatctatagtaaatccgccaatgccttctactacaatcataatttggtttactttagccatgctttcaccgagtcaatagcatcttcaaatttagagaaagcatccacggatgtgtattcattctcaccagagcgttcataaatccaaaacgcgtcaaaatcttcttcaatgatgaattccccgttaggagtttcaatattgtttctgccatcaggcgttttagatatgaaccatccgagtaaaccaacttctgtaatttgttcttcagtcatttagaatttccaccaattgattatagtttaatgcctttccagaagaaatcataacattacaaaatctgtataatgcttcttttgatactttatacacataatcagaagttgttataatgtatgaaatacgtacaaatgttggggatttttctgccaattcatacgccagttttctagctctgccaatatcatcggcaaacttggtatcagcaagcaaaatactatcaaatacccaacggttagtaaaaatttctgtgtatagaataaccttacgcatcaagatactctcgcagttcctgctcgtttaacccttcttgccacatctctgacggagatggaagttggctgtctagagtggatgaatcaattggaaatactctgataattacgctagtatcttcatcccattgatttgcgagtatccgtttagcttgactaatgtcaggctcagaatgagcccggatatacttaatccttctatgccatacaccggtaggaatagatgcgcacacgatatatgaaatcatttcgccgccttaaccgctttaacatcgcggaagcctttcttacgttgattcttcatcttacgaatagtgctttcagaaatttcaccgatacccggagtgattggttctacaccaaaggctttgatgccaaattcagacagaagataagcaaccactaattcacggatgcgggctttaccaattttttggccttcttctttcatcgtaccgtgaagctcaacttcccactgatcaagcaaagacggagttacacaacgtccttcttccagcattgcagatactttatcataagcaaaagagttcagtacgtttttgattgcttgggacatattaatttcctcagtaacgattgttttgacagaggagattttaaatcaaatctcctgtagcaaatcaatctttgagagattttaactcttcgagcatatcgtagtattctttactagcaaccggagctacagtacagtggtagctattgaattcatggtatttcacgaagcgttcaagttgccactcaatcaggttgttaattcggtgaagcagaaccccctctgaaccgacgtagacaactacttcaaattgaagcccatcccaaattctggtacggacgatatcacctacattaaatgttttcatgcgatgtaccaatgttcgttttgccaagactcacccttgtaccagcgagtcatatca
